(19) United States
(12) Patent Application Publication
(10) Pub. No.: US 2006/0269918 A1
(43) Pub. Date: Nov. 30, 2006

(54) Compositions, splice variants and methods relating to colon specific genes and proteins

(76) Inventors: Roberto A Macina, San Jose, CA (US); Leah R. Turner, Sunnyvale, CA (US); Yongming Sun, Redwood City, CA (US)

Correspondence Address: LICATA & TYRRELL P.C., 66 E. MAIN STREET, MARLTON, NJ, 08053, US

(21) Appl. No.: 10/537,402

(22) PCT Filed: Dec. 4, 2003
(86) PCT No.: PCT/US03/40063

§ 371 Date: Jun. 12, 2006

Related U.S. Application Data
(60) Provisional application No. 60/431,132, filed on Dec. 4, 2002.
(60) Provisional application No. 60/431,144, filed on Dec. 4, 2002.

(51) Int. Cl. C12Q 1/68; G01N 33/574; C07H 21/04; A61K 38/17; A61K 48/00; C07K 14/82

(52) U.S. Cl. 435/6; 435/7.23; 435/69.1; 435/320.1; 435/325; 530/350; 530/388.8; 514/12; 514/44; 536/23.5

(57) ABSTRACT

The present invention relates to newly identified nucleic acid molecules and polypeptides present in normal and neoplastic colon cells, including fragments, variants and derivatives of the nucleic acids and polypeptides. The present invention also relates to antibodies to the polypeptides of the invention, as well as agonists and antagonists of the polypeptides of the invention. The invention also relates to compositions containing the nucleic acid molecules, polypeptides, antibodies, agonists and antagonists of the invention and methods for the use of these compositions. These uses include identifying, diagnosing, monitoring, staging, imaging and treating colon cancer and non-cancerous disease states in colon, identifying colon tissue, monitoring and identifying and/or designing agonists and antagonists of polypeptides of the invention. The uses also include gene therapy, production of transgenic animals and cells, and production of engineered colon tissue for treatment and research.

### INTRODUCTION

[0001] This application claims the benefit of priority from U.S. Provisional Patent Application Ser. No. 60/431,132 filed Dec. 4, 2002 and 60/431,144 filed Dec. 4, 2002, which are herein incorporated by reference in their entireties.

### FIELD OF THE INVENTION

[0002] The present invention relates to newly identified nucleic acids and polypeptides present in normal and neoplastic colon cells, including fragments, variants and derivatives of the nucleic acids and polypeptides. The present invention also relates to antibodies to the polypeptides of the invention, as well as agonists and antagonists of the polypeptides of the invention. The invention also relates to compositions comprising the nucleic acids, polypeptides, antibodies, post translational modifications (PTMs), variants, derivatives, agonists and antagonists thereof and methods for the use of these compositions. These uses include identifying, diagnosing, monitoring, staging, imaging and treating colon cancer and/or non-cancerous disease states in colon, identifying colon tissue and monitoring and identifying and/or designing agonists and antagonists of polypeptides of the invention. The uses also include gene therapy, therapeutic molecules including but not limited to antibodies or antisense molecules, production of transgenic animals and cells, and production of engineered colon tissue for treatment and research.

### BACKGROUND OF THE INVENTION

[0003] Colorectal cancer is the second most common cause of cancer death in the United States and the third most prevalent cancer in both men and women. M. L. Davila & A. D. Davila, Screening for Colon and Rectal Cancer, in Colon and Rectal Cancer 47 (Peter S. Edelstein ed., 2000). The American Cancer Society estimates that there will be about 105,500 new cases of colon cancer and 42,000 new cases of rectal cancer in 2003 in the United States. Colon cancer and rectal cancer will cause about 57,100 deaths combined. ACS Website: cancer.org on the world wide web. Nearly all cases of colorectal cancer arise from adenomatous polyps, some of which mature into large polyps, undergo abnormal growth and development, and ultimately progress into cancer. Davila at 55-56. This progression would appear to take at least 10 years in most patients, rendering it a readily treatable form of cancer if diagnosed early, when the cancer is localized. Davila at 56; Walter J. Burdette, Cancer: Etiology, Diagnosis, and Treatment 125 (1998).

[0004] Although our understanding of the etiology of colon cancer is undergoing continual refinement, extensive research in this area points to a combination of factors, including age, hereditary and nonhereditary conditions, and environmental/dietary factors. Age is a key risk factor in the development of colorectal cancer, Davila at 48, with men and women over 40 years of age becoming increasingly susceptible to that cancer. Burdette at 126. Incidence rates increase considerably in each subsequent decade of life. Davila at 48. A number of hereditary and nonhereditary conditions have also been linked to a heightened risk of developing colorectal cancer, including familial adenomatous polyposis (FAP), hereditary nonpolyposis colorectal cancer (Lynch syndrome or HNPCC), a personal and/or family history of colorectal cancer or adenomatous polyps, inflammatory bowel disease, diabetes mellitus, and obesity. Davila at 47; Henry T. Lynch & Jane F. Lynch, Hereditary Nonpolyposis Colorectal Cancer (Lynch Syndromes), in Colon and Rectal Cancer 67-68 (Peter S. Edelstein ed., 2000).

[0005] Environmental/dietary factors associated with an increased risk of colorectal cancer include a high fat diet, intake of high dietary red meat, and sedentary lifestyle. Davila at 47; Reddy, B. S., Prev. Med. 16(4): 460-7 (1987). Conversely, environmental/dietary factors associated with a reduced risk of colorectal cancer include a diet high in fiber, folic acid, calcium, and hormone-replacement therapy in post-menopausal women. Davila at 50-55. The effect of antioxidants in reducing the risk of colon cancer is unclear. Davila at 53.

[0006] Because colon cancer is highly treatable when detected at an early, localized stage, screening should be a part of routine care for all adults starting at age 50, especially those with first-degree relatives with colorectal cancer. One major advantage of colorectal cancer screening over its counterparts in other types of cancer is its ability to not only detect precancerous lesions, but to remove them as well. Davila at 56. The key colorectal cancer screening tests in use today are fecal occult blood test, sigmoidoscopy, colonoscopy, double-contrast barium enema, and the carcinoembryonic antigen (CEA) test. Burdette at 125; Davila at 56.

[0007] The fecal occult blood test (FOBT) screens for colorectal cancer by detecting the amount of blood in the stool, the premise being that neoplastic tissue, particularly malignant tissue, bleeds more than typical mucosa, with the amount of bleeding increasing with polyp size and cancer stage. Davila at 56-57. While effective at detecting early stage tumors, FOBT is unable to detect adenomatous polyps (premalignant lesions), and, depending on the contents of the fecal sample, is subject to rendering false positives. Davila at 56-59. Sigmoidoscopy and colonoscopy, by contrast, allow direct visualization of the bowel, and enable one to detect, biopsy, and remove adenomatous polyps. Davila at 59-60, 61. Despite the advantages of these procedures, there are accompanying downsides: sigmoidoscopy, by definition, is limited to the sigmoid colon and below, colonoscopy is a relatively expensive procedure, and both share the risk of possible bowel perforation and hemorrhaging. Davila at 59-60. Double-contrast barium enema (DCBE) enables detection of lesions better than FOBT, and almost as well a colonoscopy, but it may be limited in evaluating the winding rectosigmoid region. Davila at 60. The CEA blood test, which involves screening the blood for carcinoembryonic antigen, shares the downside of FOBT, in that it is of limited utility in detecting colorectal cancer at an early stage. Burdette at 125.

[0008] Once colon cancer has been diagnosed, treatment decisions are typically made in reference to the stage of cancer progression. A number of techniques are employed to stage the cancer (some of which are also used to screen for colon cancer), including pathologic examination of resected colon, sigmoidoscopy, colonoscopy, and various imaging techniques. AJCC Cancer Staging Handbook 84 (Irvin D. Fleming et al. eds., 5^{th} ed. 1998); Montgomery, R. C. and Ridge, J. A., Semin. Surg. Oncol. 15(3): 143-150 (1998). Moreover, chest films, liver functionality tests, and liver scans are employed to determine the extent of metastasis. Fleming at 84. While computerized tomography and magnetic resonance imaging are useful in staging colorectal cancer in its later stages, both have unacceptably low staging accuracy for identifying early stages of the disease, due to the difficulty that both methods have in (1) revealing the depth of bowel wall tumor infiltration and (2) diagnosing malignant adenopathy. Thoeni, R. F., Radiol. Clin. N. Am. 35(2): 457-85 (1997). Rather, techniques such as transrectal ultrasound (TRUS) are preferred in this context, although this technique is inaccurate with respect to detecting small lymph nodes that may contain metastases. David Blumberg & Frank G. Opelka, Neoadjuvant and Adjuvant Therapy for Adenocarcinoma of the Rectum, in Colon and Rectal Cancer 316 (Peter S. Edelstein ed., 2000).

[0009] Several classification systems have been devised to stage the extent of colorectal cancer, including the Dukes' system and the more detailed International Union against Cancer-American Joint Committee on Cancer TNM staging system, which is considered by many in the field to be a more useful staging system. Burdette at 126-27. The TNM system, which is used for either clinical or pathological staging, is divided into four stages, each of which evaluates the extent of cancer growth with respect to primary tumor (T), regional lymph nodes (N), and distant metastasis (M). Fleming at 84-85. The system focuses on the extent of tumor invasion into the intestinal wall, invasion of adjacent structures, the number of regional lymph nodes that have been affected, and whether distant metastasis has occurred. Fleming at 81.

[0010] Stage 0 is characterized by in situ carcinoma (Tis), in which the cancer cells are located inside the glandular basement membrane (intraepithelial) or lamina propria (intramucosal). In this stage, the cancer has not spread to the regional lymph nodes (N0), and there is no distant metastasis (M0). In stage I, there is still no spread of the cancer to the regional lymph nodes and no distant metastasis, but the tumor has invaded the submucosa (T1) or has progressed further to invade the muscularis propria (T2). Stage II also involves no spread of the cancer to the regional lymph nodes and no distant metastasis, but the tumor has invaded the subserosa, or the nonperitonealized pericolic or perirectal tissues (T3), or has progressed to invade other organs or structures, and/or has perforated the visceral peritoneum (T4). Stage III is characterized by any of the T substages, no distant metastasis, and either metastasis in 1 to 3 regional lymph nodes (N1) or metastasis in four or more regional lymph nodes (N2). Lastly, stage IV involves any of the T or N substages, as well as distant metastasis. Fleming at 84-85; Burdette at 127.

[0011] Currently, pathological staging of colon cancer is preferable over clinical staging as pathological staging provides a more accurate prognosis. Pathological staging typically involves examination of the resected colon section, along with surgical examination of the abdominal cavity. Fleming at 84. Clinical staging would be a preferred method of staging were it at least as accurate as pathological staging, as it does not depend on the invasive procedures of its counterpart.

[0012] Turning to the treatment of colorectal cancer, surgical resection results in a cure for roughly 50% of patients. Irradiation is used both preoperatively and postoperatively in treating colorectal cancer. Chemotherapeutic agents, particularly 5-fluorouracil, are also powerful weapons in treating colorectal cancer. Other agents include irinotecan and floxuridine, cisplatin, levamisole, methotrexate, interferon-α, and leucovorin. Burdette at 125, 132-33. Nonetheless, thirty to forty percent of patients will develop a recurrence of colon cancer following surgical resection, which in many patients is the ultimate cause of death. Wayne De Vos, Follow-up After Treatment of Colon Cancer, Colon and Rectal Cancer 225 (Peter S. Edelstein ed., 2000). Accordingly, colon cancer patients must be closely monitored to determine response to therapy and to detect persistent or recurrent disease and metastasis.

[0013] The next few paragraphs describe the some of molecular bases of colon cancer. In the case of FAP, the tumor suppressor gene APC (adenomatous polyposis coli), chromosomally located at 5q21, has been either inactivated or deleted by mutation. Alberts et al., Molecular Biology of the Cell 1288 (3d ed. 1994). The APC protein plays a role in a number of functions, including cell adhesion, apoptosis, and repression of the c-myc oncogene. N. R. Hall & R. D. Madoff, Genetics and the Polyp-Cancer Sequence, Colon and Rectal Cancer 8 (Peter S. Edelstein, ed., 2000). Of those patients with colorectal cancer who have normal APC genes, over 65% have such mutations in the cancer cells but not in other tissues. Alberts et al., supra at 1288. In the case of HPNCC, patients manifest abnormalities in the tumor suppressor gene HNPCC, but only about 15% of tumors contain the mutated gene. Id. A host of other genes have also been implicated in colorectal cancer, including the K-ras, N-ras, H-ras and c-myc oncogenes, and the tumor suppressor genes DCC (deleted in colon carcinoma) and p53. Hall & Madoff, at 8-9; Alberts et al., at 1288.

[0014] Abnormalities in Wg/Wnt signal transduction pathway are also associated with the development of colorectal carcinoma. Taipale, J. and Beachy, P. A. Nature 411: 349-354 (2001). Wnt1 is a secreted protein gene originally identified within mouse mammary cancers by its insertion into the mouse mammary tumor virus (MMTV) gene. The protein is homologous to the wingless (Wg) gene product of Drosophila, in which it functions as an important factor for the determination of dorsal-ventral segmentation and regulates the formation of fly imaginal discs. Wg/Wnt pathway controls cell proliferation, death and differentiation. Taipal (2001). There are at least 13 members in the Wnt family. These proteins have been found expressed mainly in the central nervous system (CNS) of vertebrates as well as other tissues such as mammary and intestine. The Wnt proteins are the ligands for a family of seven transmembrane domain receptors related to the Frizzled gene product in Drosophila. Binding Wnt to Frizzled stimulates the activity of the downstream target, Dishevelled, which in turn inactivates the glycogen synthesase kinase 3β (GSK3β). Taipal (2001). Usually active GSK3β will form a complex with the adenomatous polyposis coli (APC) protein and phosphorylate another complex member, β-catenin. Once phosphorylated, β-catenin is directed to degradation through the ubiquitin pathway. When GSK3β or APC activity is down regulated, β-catenin is accumulated in the cytoplasm and binds to the T-cell factor or lymphocyte excitation factor (Tcf/Lef) family of transcriptional factors. Binding of β-catenin to Tcf releases the transcriptional repression and induces gene transcription. Among the genes regulated by β-catenin are a transcriptional repressor Engrailed, a transforming growth factor-β (TGF-β) family member Decapentaplegic, and the cytokine Hedgehog in Drosophila. β-Catenin is also involved in regulating cell adhesion by binding to α-catenin and E-cadherin. On the other hand, binding of β-catenin to these proteins controls the cytoplasmic β-catenin level and its complexing with TCF. Taipal (2001). Growth factor stimulation and activation of c-src or v-src also regulate β-catenin level by phosphorylation of α-catenin and its related protein, p120^{cas}. When phosphorylated, these proteins decrease their binding to E-cadherin and β-catenin resulting in the accumulation of cytoplasmic β-catenin. Reynolds, A. B. et al. Mol. Cell Biol. 14: 8333-8342 (1994). In colon cancer, c-src enzymatic activity has been shown to be increased to the level of v-src. Alternation of components in the Wg/Wnt pathway promotes colorectal carcinoma development. The best known modifications are to the APC gene. Nicola S et al. Hum. Mol. Genet 10:721-733 (2001). This germline mutation causes the appearance of hundreds to thousands of adenomatous polyps in the large bowel. It is the gene defect that accounts for the autosomally dominantly inherited FAP and related syndromes. The molecular alternations that occur in this pathway largely involve deletions of alleles of tumor-suppressor genes, such as APC, p53 and Deleted in Colorectal Cancer (DCC), combined with mutational activation of proto-oncogenes, especially c-Ki-ras. Aoki, T. et al. Human Mutat. 3: 342-346 (1994). All of these lead to genomic instability in colorectal cancers.

[0015] Another source of genomic instability in colorectal cancer is the defect of DNA mismatch repair (MMR) genes. Human homologues of the bacterial mutHLS complex (hMSH2, hMLH1, hPMS1, hPMS2 and hMSH6), which is involved in the DNA mismatch repair in bacteria, have been shown to cause the HNPCC (about 70-90% HNPCC) when mutated. Modrich, P. and Lahue, R. Ann Rev. Biochem. 65: 101-133 (1996); and Peltomäki, P. Hum. Mol. Genet 10: 735-740 (2001). The inactivation of these proteins leads to the accumulation of mutations and causes genetic instability that represents errors in the accurate replication of the repetitive mono-, di-, tri- and tetra-nucleotide repeats, which are scattered throughout the genome (microsatellite regions). Jass, J. R. et al. J. Gastroenterol Hepatol 17: 17-26 (2002). Like in the classic FAP, mutational activation of c-Ki-ras is also required for the promotion of MSI in the alternative HNPCC. Mutations in other proteins such as the tumor suppressor protein phosphatase PTEN (Zhou, X. P. et al. Hum. Mol. Genet 11: 445-450 (2002)), BAX (Buttler, L. M. Aus. N. Z. J. Surg. 69: 88-94 (1999)), Caspase-5 (Planck, M. Cancer Genet Cytogenet. 134: 46-54 (2002)), TGFβ-RII (Fallik, D. et al. Gastroenterol Clin Biol. 24: 917-22 (2000)) and IGFII-R (Giovannucci E. J. Nutr. 131: 3109S-20S (2001)) have also been found in some colorectal tumors possibly as the cause of MMR defect.

[0016] Some tyrosine kinases have been shown up-regulated in colorectal tumor tissues or cell lines like HT29. Skoudy, A. et al. Biochem J. 317 (Pt 1): 279-84 (1996). Focal adhesion kinase (FAK) and its up-stream kinase c-src and c-yes in colonic epithelial cells may play an important role in the promotion of colorectal cancers through the extracellular matrix (ECM) and integrin-mediated signaling pathways. Jessup, J. M. et al., The molecular biology of colorectal carcinoma, in: The Molecular Basis of Human Cancer, 251-268 (Coleman W. B. and Tsongalis G. J. Eds. 2002). The formation of c-src/FAK complexes may coordinately deregulate VEGF expression and apoptosis inhibition. Recent evidences suggest that a specific signal-transduction pathway for cell survival that implicates integrin engagement leads to FAK activation and thus activates PI-3 kinase and akt. In turn, akt phosphorylates BAD and blocks apoptosis in epithelial cells. The activation of c-src in colon cancer may induce VEGF expression through the hypoxia pathway. Other genes that may be implicated in colorectal cancer include Cox enzymes (Ota, S. et al. Aliment Pharmacol. Ther. 16 (Suppl 2): 102-106 (2002)), estrogen (al-Azzawi, F. and Wahab, M. Climacteric 5: 3-14 (2002)), peroxisome proliferator-activated receptor-γ (PPAR-γ) (Gelman, L. et al. Cell Mol. Life Sci. 55: 932-943 (1999)), IGF-I (Giovannucci (2001)), thymine DNA glycosylase (TDG) (Hardeland, U. et al. Prog. Nucleic Acid Res. Mol. Biol. 68: 235-253 (2001)) and EGF (Mendelsohn, J. Endocrine-Related Cancer 8: 3-9 (2001)).

[0017] Gene deletion and mutation are not the only causes for development of colorectal cancers. Epigenetic silencing by DNA methylation also accounts for the loss of function of colorectal cancer suppressor genes. A strong association between MSI and CpG island methylation has been well characterized in sporadic colorectal cancers with high MSI but not in those of hereditary origin. In one experiment, DNA methylation of MLH1, CDKN2A, MGMT, THBS1, RARB, APC, and p14ARF genes has been shown in 80%, 55%, 23%, 23%, 58%, 35%, and 50% of 40 sporadic colorectal cancers with high MSI respectively. Yamamoto, H. et al. Genes Chromosomes Cancer 33: 322-325 (2002); and Kim, K. M. et al. Oncogene. 12;21(35): 5441-9 (2002). Carcinogen metabolism enzymes such as GST, NAT, CYP and MTHFR are also associated with an increased or decreased colorectal cancer risk. Pistorius, S. et al. Kongressbd Dtsch Ges Chir Kongr 118: 820-824 (2001); and Potter, J. D. J. Natl. Cancer Inst. 91: 916-932 (1999).

[0018] From the foregoing, it is clear that procedures used for detecting, diagnosing, monitoring, staging, prognosticating, and preventing the recurrence of colorectal cancer are of critical importance to the outcome of the patient. Moreover, current procedures, while helpful in each of these analyses, are limited by their specificity, sensitivity, invasiveness, and/or their cost. As such, highly specific and sensitive procedures that would operate by way of detecting novel markers in cells, tissues, or bodily fluids, with minimal invasiveness and at a reasonable cost, would be highly desirable.

[0019] Accordingly, there is a great need for more sensitive and accurate methods for predicting whether a person is likely to develop colorectal cancer, for diagnosing colorectal cancer, for monitoring the progression of the disease, for staging the colorectal cancer, for determining whether the colorectal cancer has metastasized, and for imaging the colorectal cancer. Following accurate diagnosis, there is also a need for less invasive and more effective treatment of colorectal cancer.

[0020] Growth and metastasis of solid tumors are also dependent on angiogenesis. Folkman, J., 1986, Cancer Research, 46, 467-473; Folkman, J., 1989, Journal of the National Cancer Institute, 82, 4-6. It has been shown, for example, that tumors which enlarge to greater than 2 mm must obtain their own blood supply and do so by inducing the growth of new capillary blood vessels. Once these new blood vessels become embedded in the tumor, they provide a means for tumor cells to enter the circulation and metastasize to distant sites such as liver, lung or bone. Weidner, N., et al., 1991, The New England Journal of Medicine, 324(1), 1-8.

[0021] Angiogenesis, defined as the growth or sprouting of new blood vessels from existing vessels, is a complex process that primarily occurs during embryonic development. The process is distinct from vasculogenesis, in that the new endothelial cells lining the vessel arise from proliferation of existing cells, rather than differentiating from stem cells. The process is invasive and dependent upon proteolysis of the extracellular matrix (ECM), migration of new endothelial cells, and synthesis of new matrix components, Angiogenesis occurs during embryogenic development of the circulatory system; however, in adult humans, angiogenesis only occurs as a response to a pathological condition (except during the reproductive cycle in women).

[0022] Under normal physiological conditions in adults, angiogenesis takes place only in very restricted situations such as hair growth and wounding healing. Auerbach, W. and Auerbach, R., 1994, Pharmacol Ther. 63(3):265-311; Ribatti et al., 1991, Haematologica 76(4):3 11-20; Risau, 1997, Nature 386(6626):67 1-4. Angiogenesis progresses by a stimulus which results in the formation of a migrating column of endothelial cells. Proteolytic activity is focused at the advancing tip of this “vascular sprout”, which breaks down the ECM sufficiently to permit the column of cells to infiltrate and migrate. Behind the advancing front, the endothelial cells differentiate and begin to adhere to each other, thus forming a new basement membrane. The cells then cease proliferation and finally define a lumen for the new arteriole or capillary.

[0023] Unregulated angiogenesis has gradually been recognized to be responsible for a wide range of disorders, including, but not limited to, cancer, cardiovascular disease, rheumatoid arthritis, psoriasis and diabetic retinopathy. Folkman, 1995, Nat Med 1(1):27-31; Isner, 1999, Circulation 99(13): 1653-5; Koch, 1998, Arthritis Rheum 41(6):951-62; Walsh, 1999, Rheumatology (Oxford) 38(2): 103-12; Ware and Simons, 1997, Nat Med 3(2): 158-64.

[0024] Of particular interest is the observation that angiogenesis is required by solid tumors for their growth and metastases. Folkman, 1986 supra; Folkman 1990, J Natl. Cancer Inst., 82(1) 4-6; Folkman, 1992, Semin Cancer Biol 3(2):65-71; Zetter, 1998, Annu Rev Med 49:407-24. A tumor usually begins as a single aberrant cell which can proliferate only to a size of a few cubic millimeters due to the distance from available capillary beds, and it can stay ‘dormant’ without further growth and dissemination for a long period of time. Some tumor cells then switch to the angiogenic phenotype to activate endothelial cells, which proliferate and mature into new capillary blood vessels. These newly formed blood vessels not only allow for continued growth of the primary tumor, but also for the dissemination and recolonization of metastatic tumor cells. The precise mechanisms that control the angiogenic switch is not well understood, but it is believed that neovascularization of tumor mass results from the net balance of a multitude of angiogenesis stimulators and inhibitors Folkman, 1995, supra.

[0025] One of the most potent angiogenesis inhibitors is endostatin identified by O'Reilly and Folkman. O'Reilly et al., 1997, Cell 88(2):277-85; O'Reilly et al., 1994, Cell 79(2):3 15-28. Its discovery was based on the phenomenon that certain primary tumors can inhibit the growth of distant metastases. O'Reilly and Folkman hypothesized that a primary tumor initiates angiogenesis by generating angiogenic stimulators in excess of inhibitors. However, angiogenic inhibitors, by virtue of their longer half life in the circulation, reach the site of a secondary tumor in excess of the stimulators. The net result is the growth of primary tumor and inhibition of secondary tumor. Endostatin is one of a growing list of such angiogenesis inhibitors produced by primary tumors. It is a proteolytic fragment of a larger protein: endostatin is a 20 kDa fragment of collagen XVIII (amino acid H1132-K1315 in murine collagen XVIII). Endostatin has been shown to specifically inhibit endothelial cell proliferation in vitro and block angiogenesis in vivo. More importantly, administration of endostatin to tumor-bearing mice leads to significant tumor regression, and no toxicity or drug resistance has been observed even after multiple treatment cycles. Boehm et al., 1997, Nature 390(6658):404-407. The fact that endostatin targets genetically stable endothelial cells and inhibits a variety of solid tumors makes it a very attractive candidate for anticancer therapy. Fidler and Ellis, 1994, Cell 79(2):185-8; Gastl et al., 1997, Oncology 54(3):177-84; Hinsbergh et al., 1999, Ann Oncol 10 Suppl 4:60-3. In addition, angiogenesis inhibitors have been shown to be more effective when combined with radiation and chemotherapeutic agents. Klement, 2000, J. Clin Invest, 105(8) R15-24. Browder, 2000, Cancer Res. 6-(7) 1878-86, Arap et al., 1998, Science 279(5349):377-80; Mauceri et al., 1998, Nature 394(6690):287-91.

### SUMMARY OF THE INVENTION

[0026] The present invention solves many needs in the art by providing nucleic acid molecules, polypeptides and antibodies thereto, variants and derivatives of the nucleic acids and polypeptides, and agonists and antagonists thereto that may be used to identify, diagnose, monitor, stage, image and treat colon cancer and/or non-cancerous disease states in colon; identify and monitor colon tissue; and identify and design agonists and antagonists of polypeptides of the invention. The invention also provides gene therapy, methods for producing transgenic animals and cells, and methods for producing engineered colon tissue for treatment and research.

[0027] One aspect of the present invention relates to nucleic acid molecules that are specific to colon cells, colon tissue and/or the colon organ. These colon specific nucleic acids (CSNAs) may be a naturally occurring cDNA, genomic DNA, RNA, or a fragment of one of these nucleic acids, or may be a non-naturally occurring nucleic acid molecule. If the CSNA is genomic DNA, then the CSNA is a colon specific gene (CSG). If the CSNA is RNA, then it is a colon specific transcript encoded by a CSG. Due to alternative splicing and transcriptional modification one CSG may encode for multiple colon specific RNAs. In a preferred embodiment, the nucleic acid molecule encodes a polypeptide that is specific to colon. More preferred is a nucleic acid molecule that encodes a polypeptide comprising an amino acid sequence of SEQ ID NO: 96-237. In another preferred embodiment, the nucleic acid molecule comprises a nucleic acid sequence of SEQ ID NO: 1-95. For the CSNA sequences listed herein, DEX0448_{—}001.nt.1 corresponds to SEQ ID NO: 1. For sequences with multiple splice variants, the parent sequence DEX0448_{—}001.nt.1, will be followed by DEX0448_{—}001.nt.2, etc. for each splice variant. The sequences off the corresponding peptides are listed as DEX0448_{—}001.aa.1, etc. For the mapping of all of the nucleotides and peptides, see the table in the Example 1 section below.

[0028] This aspect of the present invention also relates to nucleic acid molecules that selectively hybridize or exhibit substantial sequence similarity to nucleic acid molecules encoding a Colon Specific Protein (CSP), or that selectively hybridize or exhibit substantial sequence similarity to a CSNA. In one embodiment of the present invention the nucleic acid molecule comprises an allelic variant of a nucleic acid molecule encoding a CSP, or an allelic variant of a CSNA. In another embodiment, the nucleic acid molecule comprises a part of a nucleic acid sequence that encodes a CSP or a part of a nucleic acid sequence of a CSNA.

[0029] In addition, this aspect of the present invention relates to a nucleic acid molecule further comprising one or more expression control sequences controlling the transcription and/or translation of all or a part of a CSNA or the transcription and/or translation of a nucleic acid molecule that encodes all or a fragment of a CSP.

[0030] Another aspect of the present invention relates to vectors and/or host cells comprising a nucleic acid molecule of this invention. In a preferred embodiment, the nucleic acid molecule of the vector and/or host cell encodes all or a fragment of a CSP. In another preferred embodiment, the nucleic acid molecule of the vector and/or host cell comprises all or a part of a CSNA. Vectors and host cells of the present invention are useful in the recombinant production of polypeptides, particularly CSPs of the present invention.

[0031] Another aspect of the present invention relates to polypeptides encoded by a nucleic acid molecule of this invention. The polypeptide may comprise either a fragment or a full-length protein. In a preferred embodiment, the polypeptide is a CSP. However, this aspect of the present invention also relates to mutant proteins (muteins) of CSPs, fusion proteins of which a portion is a CSP, and proteins and polypeptides encoded by allelic variants of a CSNA as provided herein.

[0032] A further aspect of the present invention is a novel splice variant which encodes an amino acid sequence that provides a novel region to be targeted for the generation of reagents that can be used in the detection and/or treatment of cancer. The novel amino acid sequence may lead to a unique protein structure, protein subcellular localization, biochemical processing or function. This information can be used to directly or indirectly facilitate the generation of additional or novel therapeutics or diagnostics. The nucleotide sequence in this novel splice variant can be used as a nucleic acid probe for the diagnosis and/or treatment of cancer.

[0033] Another aspect of the present invention relates to antibodies and other binders that specifically bind to a polypeptide of the instant invention. Accordingly antibodies or binders of the present invention specifically bind to CSPs, muteins, fusion proteins, and/or homologous proteins or polypeptides encoded by allelic variants of a CSNA as provided herein.

[0034] Another aspect of the present invention relates to agonists and antagonists of the nucleic acid molecules and polypeptides of this invention. The agonists and antagonists of the instant invention may be used to treat colon cancer and non-cancerous disease states in colon and to produce engineered colon tissue.

[0035] Another aspect of the present invention relates to methods for using the nucleic acid molecules to detect or amplify nucleic acid molecules that have similar or identical nucleic acid sequences compared to the nucleic acid molecules described herein. Such methods are useful in identifying, diagnosing, monitoring, staging, imaging and treating colon cancer and/or non-cancerous disease states in-colon. Such methods are also useful in identifying and/or monitoring colon tissue. In addition, measurement of levels of one or more of the nucleic acid molecules of this invention may be useful as a diagnostic as part of a panel in combination with known other markers, particularly those described in the colon cancer background section above.

[0036] Another aspect of the present invention relates to use of the nucleic acid molecules of this invention in gene therapy, for producing transgenic animals and cells, and for producing engineered colon tissue for treatment and research.

[0037] Another aspect of the present invention relates to methods for detecting polypeptides of this invention, preferably using antibodies thereto. Such methods are useful to identify, diagnose, monitor, stage, image and treat colon cancer and non-cancerous disease states in colon. In addition, measurement of levels of one or more of the polypeptides of this invention may be useful to identify, diagnose, monitor, stage, and/or image colon cancer in combination with known other markers, particularly those described in the colon cancer background section above. The polypeptides of the present invention can also be used to identify and/or monitor colon tissue, and to produce engineered colon tissue.

[0038] Yet another aspect of the present invention relates to a computer readable means of storing the nucleic acid and amino acid sequences of the invention. The records of the computer readable means can be accessed for reading and displaying of sequences for comparison, alignment and ordering of the sequences of the invention to other sequences. In addition, the computer records regarding the nucleic acid and/or amino acid sequences and/or measurements of their levels may be used alone or in combination with other markers to diagnose colon related diseases.

### DETAILED DESCRIPTION OF THE INVENTION

Definitions and General Techniques

[0039] Unless otherwise defined herein, scientific and technical terms used in connection with the present invention shall have the meanings that are commonly understood by those of ordinary skill in the art. Further, unless otherwise required by context, singular terms shall include pluralities and plural terms shall include the singular. Generally, nomenclatures used in connection with, and techniques of, cell and tissue culture, molecular biology, immunology, microbiology, genetics and protein and nucleic acid chemistry and hybridization described herein are those well known and commonly used in the art. The methods and techniques of the present invention are generally performed according to conventional methods well known in the art and as described in various general and more specific references that are cited and discussed throughout the present specification unless otherwise indicated. See, e.g. Sambrook et al., Molecular Cloning: A Laboratory Manual, 2d ed., Cold Spring Harbor Laboratory Press (1989) and Sambrook et al., Molecular Cloning: A Laboratory Manual, 3d ed., Cold Spring Harbor Press (2001); Ausubel et al., Current Protocols in Molecular Biology, Greene Publishing Associates (1992, and Supplements to 2000); Ausubel et al., Short Protocols in Molecular Biology: A Compendium of Methods from Current Protocols in Molecular Biology—4^{th} Ed., Wiley & Sons (1999); Harlow and Lane, Antibodies: A Laboratory Manual, Cold Spring Harbor Laboratory Press (1990); and Harlow and Lane, Using Antibodies: A Laboratory Manual, Cold Spring Harbor Laboratory Press (1999).

[0040] Enzymatic reactions and purification techniques are performed according to manufacturer's specifications, as commonly accomplished in the art or as described herein. The nomenclatures used in connection with, and the laboratory procedures and techniques of, analytical chemistry, synthetic organic chemistry, and medicinal and pharmaceutical chemistry described herein are those well known and commonly used in the art. Standard techniques are used for chemical syntheses, chemical analyses, pharmaceutical preparation, formulation, and delivery, and treatment of patients.

[0041] The following terms, unless otherwise indicated, shall be understood to have the following meanings:

[0042] A “nucleic acid molecule” of this invention refers to a polymeric form of nucleotides and includes both sense and antisense strands of RNA, cDNA, genomic DNA, and synthetic forms and mixed polymers of the above. A nucleotide refers to a ribonucleotide, deoxynucleotide or a modified form of either type of nucleotide. A “nucleic acid molecule” as used herein is synonymous with “nucleic acid” and “polynucleotide.” The term “nucleic acid molecule” usually refers to a molecule of at least 10 bases in length, unless otherwise specified. The term includes single- and double-stranded forms of DNA. In addition, a polynucleotide may include either or both naturally occurring and modified nucleotides linked together by naturally occurring and/or non-naturally occurring nucleotide linkages.

[0043] Nucleotides are represented by single letter symbols in nucleic acid molecule sequences. The following table lists symbols identifying nucleotides or groups of nucleotides which may occupy the symbol position on a nucleic acid molecule. See Nomenclature Committee of the International Union of Biochemistry (NC-IUB), Nomenclature for incompletely specified bases in nucleic acid sequences, Recommendations 1984., Eur J Biochem. 150(1):1-5 (1985).

| | | Group/Origin | Complementary |
|---|---|---|---|
| Symbol | Meaning | of Designation | Symbol |
| a | a | Adenine | t/u |
| g | g | Guanine | c |
| c | c | Cytosine | g |
| t | t | Thymine | a |
| u | u | Uracil | a |
| r | g or a | puRine | y |
| y | t/u or c | pYrimidine | r |
| m | a or c | aMino | k |
| k | g or t/u | Keto | m |
| s | g or c | Strong interactions 3H-bonds | w |
| w | a or t/u | Weak interactions 2H-bonds | s |
| b | g or c or t/u | not a | v |
| d | a or g or t/u | not c | h |
| h | a or c or t/u | not g | d |
| v | a or g or c | not t, not u | b |
| n | a or g or c | aNy | n |
| | or t/u, | | |
| | unknown, or | | |
| | other | | |

[0044] The nucleic acid molecules may be modified chemically or biochemically or may contain non-natural or derivatized nucleotide bases, as will be readily appreciated by those of skill in the art. Such modifications include, for example, labels, methylation, substitution of one or more of the naturally occurring nucleotides with an analog, internucleotide modifications such as uncharged linkages (e.g., methyl phosphonates, phosphotriesters, phosphoramidates, carbamates, etc.), charged linkages (e.g., phosphorothioates, phosphorodithioates, etc.), pendent moieties (e.g., polypeptides), intercalators (e.g., acridine, psoralen, etc.), chelators, alkylators, and modified linkages (e.g., alpha anomeric nucleic acids, etc.) The term “nucleic acid molecule” also includes any topological conformation, including single-stranded, double-stranded, partially duplexed, triplexed, hairpinned, circular and padlocked conformations. Also included are synthetic molecules that mimic polynucleotides in their ability to bind to a designated sequence via hydrogen bonding and other chemical interactions. Such molecules are known in the art and include, for example, those in which peptide linkages substitute for phosphate linkages in the backbone of the molecule.

[0045] A “gene” is defined as a nucleic acid molecule that comprises a nucleic acid sequence that encodes a polypeptide and the expression control sequences that surround the nucleic acid sequence that encodes the polypeptide. For instance, a gene may comprise a promoter, one or more enhancers, a nucleic acid sequence that encodes a polypeptide, downstream regulatory sequences and, possibly, other nucleic acid sequences involved in regulation of the expression of an RNA. As is well known in the art, eukaryotic genes usually contain both exons and introns. The term “exon” refers to a nucleic acid sequence found in genomic DNA that is bioinformatically predicted and/or experimentally confirmed to contribute contiguous sequence to a mature mRNA transcript. The term “intron” refers to a nucleic acid sequence found in genomic DNA that is predicted and/or confirmed to not contribute to a mature mRNA transcript, but rather to be “spliced out” during processing of the transcript.

[0046] A nucleic acid molecule or polypeptide is “derived” from a particular species if the nucleic acid molecule or polypeptide has been isolated from the particular species, or if the nucleic acid molecule or polypeptide is homologous to a nucleic acid molecule or polypeptide isolated from a particular species.

[0047] An “isolated” or “substantially pure” nucleic acid or polynucleotide (e.g., an RNA, DNA or a mixed polymer) is one which is substantially separated from other cellular components that naturally accompany the native polynucleotide in its natural host cell, e.g., ribosomes, polymerases, or genomic sequences with which it is naturally associated. The term embraces a nucleic acid or polynucleotide that (1) has been removed from its naturally occurring environment, (2) is not associated with all or a portion of a polynucleotide in which the “isolated polynucleotide” is found in nature, (3) is operatively linked to a polynucleotide which it is not linked to in nature, (4) does not occur in nature as part of a larger sequence or (5) includes nucleotides or internucleoside bonds that are not found in nature. The term “isolated” or “substantially pure” also can be used in reference to recombinant or cloned DNA isolates, chemically synthesized polynucleotide analogs, or polynucleotide analogs that are biologically synthesized by heterologous systems. The term “isolated nucleic acid molecule” includes nucleic acid molecules that are integrated into a host cell chromosome at a heterologous site, recombinant fusions of a native fragment to a heterologous sequence, recombinant vectors present as episomes or as integrated into a host cell chromosome.

[0048] A “part” of a nucleic acid molecule refers to a nucleic acid molecule that comprises a partial contiguous sequence of at least 10 bases of the reference nucleic acid molecule. Preferably, a part comprises at least 15 to 20 bases of a reference nucleic acid molecule. In theory, a nucleic acid sequence of 17 nucleotides is of sufficient length to occur at random less frequently than once in the three gigabase human genome, and thus provides a nucleic acid probe that can uniquely identify the reference sequence in a nucleic acid mixture of genomic complexity. A preferred part is one that comprises a nucleic acid sequence that can encode at least 6 contiguous amino acid sequences (fragments of at least 18 nucleotides) because they are useful in directing the expression or synthesis of peptides that are useful in mapping the epitopes of the polypeptide encoded by the reference nucleic acid. See, e.g., Geysen et al., Proc. Natl. Acad. Sci. USA 81:3998-4002 (1984); and U.S. Pat. Nos. 4,708,871 and 5,595,915, the disclosures of which are incorporated herein by reference in their entireties. A part may also comprise at least 25, 30, 35 or 40 nucleotides of a reference nucleic acid molecule, or at least 50, 60, 70, 80, 90, 100, 150, 200, 250, 300, 350, 400 or 500 nucleotides of a reference nucleic acid molecule. A part of a nucleic acid molecule may comprise no other nucleic acid sequences. Alternatively, a part of a nucleic acid may comprise other nucleic acid sequences from other nucleic acid molecules.

[0049] The term “oligonucleotide” refers to a nucleic acid molecule generally comprising a length of 200 bases or fewer. The term often refers to single-stranded deoxyribonucleotides, but it can refer as well to single-or double-stranded ribonucleotides, RNA:DNA hybrids and double-stranded DNAs, among others. Preferably, oligonucleotides are 10 to 60 bases in length and most preferably 12, 13, 14, 15, 16, 17, 18, 19 or 20 bases in length. Other preferred oligonucleotides are 25, 30, 35, 40, 45, 50, 55 or 60 bases in length. Oligonucleotides may be single-stranded, e.g. for use as probes or primers, or may be double-stranded, e.g. for use in the construction of a mutant gene. Oligonucleotides of the invention can be either sense or antisense oligonucleotides. An oligonucleotide can be derivatized or modified as discussed above for nucleic acid molecules.

[0050] Oligonucleotides, such as single-stranded DNA probe oligonucleotides, often are synthesized by chemical methods, such as those implemented on automated oligonucleotide synthesizers. However, oligonucleotides can be made by a variety of other methods, including in vitro recombinant DNA-mediated techniques and by expression of DNAs in cells and organisms. Initially, chemically synthesized DNAs typically are obtained without a 5′ phosphate. The 5′ ends of such oligonucleotides are not substrates for phosphodiester bond formation by ligation reactions that employ DNA ligases typically used to form recombinant DNA molecules. Where ligation of such oligonucleotides is desired, a phosphate can be added by standard techniques, such as those that employ a kinase and ATP. The 3′ end of a chemically synthesized oligonucleotide generally has a free hydroxyl group and, in the presence of a ligase, such as T4 DNA ligase, readily will form a phosphodiester bond with a 5′ phosphate of another polynucleotide, such as another oligonucleotide. As is well known, this reaction can be prevented selectively, where desired, by removing the 5′ phosphates of the other polynucleotide(s) prior to ligation.

[0051] The tern “naturally occurring nucleotide” referred to herein includes naturally occurring deoxyribonucleotides and ribonucleotides. The term “modified nucleotides” referred to herein includes nucleotides with modified or substituted sugar groups and the like. The term “nucleotide linkages” referred to herein includes nucleotide linkages such as phosphorothioate, phosphorodithioate, phosphoroselenoate, phosphorodiselenoate, phosphoroanilothioate, phoshoraniladate, phosphoroamidate, and the like. See e.g., LaPlanche et al. Nucl. Acids Res. 14:9081-9093 (1986); Stein et al. Nucl. Acids Res. 16:3209-3221 (1988); Zon et al. Anti-Cancer Drug Design 6:539-568 (1991); Zon et al., in Eckstein (ed.) Oligonucleotides and Analogues: A Practical Approach, pp. 87-108, Oxford University Press (1991); Uhlmann and Peyman Chemical Reviews 90:543 (1990), and U.S. Pat. No. 5,151,510, the disclosure of which is hereby incorporated by reference in its entirety.

[0052] Unless specified otherwise, the left hand end of a polynucleotide sequence in sense orientation is the 5′ end and the right hand end of the sequence is the 3′ end. In addition, the left hand direction of a polynucleotide sequence in sense orientation is referred to as the 5′ direction, while the right hand direction of the polynucleotide sequence is referred to as the 3′ direction. Further, unless otherwise indicated, each nucleotide sequence is set forth herein as a sequence of deoxyribonucleotides. It is intended, however, that the given sequence be interpreted as would be appropriate to the polynucleotide composition: for example, if the isolated nucleic acid is composed of RNA, the given sequence intends ribonucleotides, with uridine substituted for thymidine.

[0053] The term “allelic variant” refers to one of two or more alternative naturally occurring forms of a gene, wherein each gene possesses a unique nucleotide sequence. In a preferred embodiment, different alleles of a given gene have similar or identical biological properties.

[0054] The term “percent sequence identity” in the context of nucleic acid sequences refers to the residues in two sequences which are the same when aligned for maximum correspondence. The length of sequence identity comparison may be over a stretch of at least about nine nucleotides, usually at least about 20 nucleotides, more usually at least about 24 nucleotides, typically at least about 28 nucleotides, more typically at least about 32 nucleotides, and preferably at least about 36 or more nucleotides. There are a number of different algorithms known in the art which can be used to measure nucleotide sequence identity. For instance, polynucleotide sequences can be compared using FASTA, Gap or Bestfit, which are programs in Wisconsin Package Version 10.0, Genetics Computer Group (GCG), Madison, Wis. FASTA, which includes, e.g., the programs FASTA2 and FASTA3, provides alignments and percent sequence identity of the regions of the best overlap between the query and search sequences (Pearson, Methods Enzymol. 183: 63-98 (1990); Pearson, Methods Mol. Biol. 132: 185-219 (2000); Pearson, Methods Enzymol. 266: 227-258 (1996); Pearson, J. Mol. Biol. 276: 71-84 (1998)). Unless otherwise specified, default parameters for a particular program or algorithm are used. For instance, percent sequence identity between nucleic acid sequences can be determined using FASTA with its default parameters (a word size of 6 and the NOPAM factor for the scoring matrix) or using Gap with its default parameters as provided in GCG Version 6.1.

[0055] A reference to a nucleic acid sequence encompasses its complement unless otherwise specified. Thus, a reference to a nucleic acid molecule having a particular sequence should be understood to encompass its complementary strand, with its complementary sequence. The complementary strand is also useful, e.g., for antisense therapy, double-stranded RNA (dsRNA) inhibition (RNAi), combination of triplex and antisense, hybridization probes and PCR primers.

[0056] In the molecular biology art, researchers use the terms “percent sequence identity”, “percent sequence similarity” and “percent sequence homology” interchangeably. In this application, these terms shall have the same meaning with respect to nucleic acid sequences only.

[0057] The term “substantial similarity” or “substantial sequence similarity,” when referring to a nucleic acid or fragment thereof, indicates that, when optimally aligned with appropriate nucleotide insertions or deletions with another nucleic acid (or its complementary strand), there is nucleotide sequence identity in at least about 50%, more preferably 60% of the nucleotide bases, usually at least about 70%, more usually at least about 80%, preferably at least about 90%, and more preferably at least about 95-98% of the nucleotide bases, as measured by any well known algorithm of sequence identity, such as FASTA, BLAST or Gap, as discussed above.

[0058] Alternatively, substantial similarity exists between a first and second nucleic acid sequence when the first nucleic acid sequence or fragment thereof hybridizes to an antisense strand of the second nucleic acid, under selective hybridization conditions. Typically, selective hybridization will occur between the first nucleic acid sequence and an antisense strand of the second nucleic acid sequence when there is at least about 55% sequence identity between the first and second nucleic acid sequences—preferably at least about 65%, more preferably at least about 75%, and most preferably at least about 90%—over a stretch of at least about 14 nucleotides, more preferably at least 17 nucleotides, even more preferably at least 20, 25, 30, 35, 40, 50, 60, 70, 80, 90 or 100 nucleotides.

[0059] Nucleic acid hybridization will be affected by such conditions as salt concentration, temperature, solvents, the base composition of the hybridizing species, length of the complementary regions, and the number of nucleotide base mismatches between the hybridizing nucleic acids, as will be readily appreciated by those skilled in the art. “Stringent hybridization conditions” and “stringent wash conditions” in the context of nucleic acid hybridization experiments depend upon a number of different physical parameters. The most important parameters include temperature of hybridization, base composition of the nucleic acids, salt concentration and length of the nucleic acid. One having ordinary skill in the art knows how to vary these parameters to achieve a particular stringency of hybridization. In general, “stringent hybridization” is performed at about 25° C. below the thermal melting point (Tₘ) for the specific DNA hybrid under a particular set of conditions. “Stringent washing” is performed at temperatures about 5° C. lower than the Tₘ for the specific DNA hybrid under a particular set of conditions. The Tₘ is the temperature at which 50% of the target sequence hybridizes to a perfectly matched probe. See Sambrook (1989), supra, p. 9.51.

[0060] The Tₘ for a particular DNA-DNA hybrid can be estimated by the formula:
Tₘ=81.5° C.+16.6(log₁₀[Na⁺])+0.41(fraction G+C)−0.63(% formamide)−(600/1) where 1 is the length of the hybrid in base pairs.

[0061] The Tₘ for a particular RNA-RNA hybrid can be estimated by the formula:
Tₘ=79.8° C.+18.5(log₁₀[Na⁺])+0.58(fraction G+C)+11.8(fraction G+C)²−0.35(% formamide)−(820/1).

[0062] The Tₘ for a particular RNA-DNA hybrid can be estimated by the formula:
Tₘ=79.8° C.+18.5(log₁₀[Na⁺])+0.58(fraction G+C)+11.8(fraction G+C)²−0.50(% formamide)−(820/1).

[0063] In general, the Tₘ decreases by 1-1.5° C. for each 1% of mismatch between two nucleic acid sequences. Thus, one having ordinary skill in the art can alter hybridization and/or washing conditions to obtain sequences that have higher or lower degrees of sequence identity to the target nucleic acid. For instance, to obtain hybridizing nucleic acids that contain up to 10% mismatch from the target nucleic acid sequence, 10-15° C. would be subtracted from the calculated Tₘ of a perfectly matched hybrid, and then the hybridization and washing temperatures adjusted accordingly. Probe sequences may also hybridize specifically to duplex DNA under certain conditions to form triplex or other higher order DNA complexes. The preparation of such probes and suitable hybridization conditions are well known in the art.

[0064] An example of stringent hybridization conditions for hybridization of complementary nucleic acid sequences having more than 100 complementary residues on a filter in a Southern or Northern blot or for screening a library is 50% formamide/6×SSC at 42° C. for at least ten hours and preferably overnight (approximately 16 hours). Another example of stringent hybridization conditions is 6×SSC at 68° C. without formamide for at least ten hours and preferably overnight. An example of moderate stringency hybridization conditions is 6×SSC at 55° C. without formamide for at least ten hours and preferably overnight. An example of low stringency hybridization conditions for hybridization of complementary nucleic acid sequences having more than 100 complementary residues on a filter in a Southern or northern blot or for screening a library is 6×SSC at 42° C. for at least ten hours. Hybridization conditions to identify nucleic acid sequences that are similar but not identical can be identified by experimentally changing the hybridization temperature from 68° C. to 42° C. while keeping the salt concentration constant (6×SSC), or keeping-the hybridization temperature and salt concentration constant (e.g. 42° C. and 6×SSC) and varying the formamide concentration from 50% to 0%. Hybridization buffers may also include blocking agents to lower background. These agents are well known in the art. See Sambrook et al. (1989), supra, pages 8.46 and 9.46-9.58. See also Ausubel (1992), supra, Ausubel (1999), supra, and Sambrook (2001), supra.

[0065] Wash conditions also can be altered to change stringency conditions. An example of stringent wash conditions is a 0.2×SSC wash at 65° C. for 15 minutes (see Sambrook (1989), supra, for SSC buffer). Often the high stringency wash is preceded by a low stringency wash to remove excess probe. An exemplary medium stringency wash for duplex DNA of more than 100 base pairs is 1×SSC at 45° C. for 15 minutes. An exemplary low stringency wash for such a duplex is 4×SSC at 40° C. for 15 minutes. In general, signal-to-noise ratio of 2× or higher than that observed for an unrelated probe in the particular hybridization assay indicates detection of a specific hybridization.

[0066] As defined herein, nucleic acids that do not hybridize to each other under stringent conditions are still substantially similar to one another if they encode polypeptides that are substantially identical to each other. This occurs, for example, when a nucleic acid is created synthetically or recombinantly using a high codon degeneracy as permitted by the redundancy of the genetic code.

[0067] Hybridization conditions for nucleic acid molecules that are shorter than 100 nucleotides in length (e.g., for oligonucleotide probes) may be calculated by the formula:

[0068] Tₘ=81.5° C.+16.6(log₁₀[Na⁺])+0.41(fraction G+C)−(600/N), wherein N is change length and the [Na⁺] is 1 M or less. See Sambrook (1989), supra, p. 11.46. For hybridization of probes shorter than 100 nucleotides, hybridization is usually performed under stringent conditions (5-10° C. below the Tₘ) using high concentrations (0.1-1.0 pmol/ml) of probe. Id. at p. 11.45. Determination of hybridization using mismatched probes, pools of degenerate probes or “guessmers,” as well as hybridization solutions and methods for empirically determining hybridization conditions are well known in the art. See, e.g., Ausubel (1999), supra; Sambrook (1989), supra, pp. 11.45-11.57.

[0069] The term “digestion” or “digestion of DNA” refers to catalytic cleavage of the DNA with a restriction enzyme that acts only at certain sequences in the DNA. The various restriction enzymes referred to herein are commercially available and their reaction conditions, cofactors and other requirements for use are known and routine to the skilled artisan. For analytical purposes, typically, 1 μg of plasmid or DNA fragment is digested with about 2 units of enzyme in about 20 μl of reaction buffer. For the purpose of isolating DNA fragments for plasmid construction, typically 5 to 50 μg of DNA are digested with 20 to 250 units of enzyme in proportionately larger volumes. Appropriate buffers and substrate amounts for particular restriction enzymes are described in standard laboratory manuals, such as those referenced below, and are specified by commercial suppliers. Incubation times of about 1 hour at 37° C. are ordinarily used, but conditions may vary in accordance with standard procedures, the supplier's instructions and the particulars of the reaction. After digestion, reactions may be analyzed, and fragments may be purified by electrophoresis through an agarose or polyacrylamide gel, using well known methods that are routine for those skilled in the art.

[0070] The term “ligation” refers to the process of forming phosphodiester bonds between two or more polynucleotides, which most often are double-stranded DNAs. Techniques for ligation are well known to the art and protocols for ligation are described in standard laboratory manuals and references, such as, e.g., Sambrook (1989), supra.

[0071] Genome-derived “single exon probes,” are probes that comprise at least part of an exon (“reference exon”) and can hybridize detectably under high stringency conditions to transcript-derived nucleic acids that include the reference exon but do not hybridize detectably under high stringency conditions to nucleic acids that lack the reference exon. Single exon probes typically further comprise, contiguous to a first end of the exon portion, a first intronic and/or intergenic sequence that is identically contiguous to the exon in the genome, and may contain a second intronic and/or intergenic sequence that is identically contiguous to the exon in the genome. The minimum length of genome-derived single exon probes is defined by the requirement that the exonic portion be of sufficient length to hybridize under high stringency conditions to transcript-derived nucleic acids, as discussed above. The maximum length of genome-derived single exon probes is defined by the requirement that the probes contain portions of no more than one exon. The single exon probes may contain priming sequences not found in contiguity with the rest of the probe sequence in the genome, which priming sequences are useful for PCR and other amplification-based technologies. In another aspect, the invention is directed to single exon probes based on the CSNAs disclosed herein.

[0072] In one embodiment, the term “microarray” refers to a “nucleic acid microarray” having a substrate-bound plurality of nucleic acids, hybridization to each of the plurality of bound nucleic acids being separately detectable. The substrate can be solid or porous, planar or non-planar, unitary or distributed. Nucleic acid microarrays include all the devices so called in Schena (ed.), DNA Microarrays: A Practical Approach (Practical Approach Series), Oxford University Press (1999); Nature Genet. 21(1)(suppl.):1-60 (1999); Schena (ed.), Microarray Biochip: Tools and Technology, Eaton Publishing Company/BioTechniques Books Division (2000). Additionally, these nucleic acid microarrays include a substrate-bound plurality of nucleic acids in which the plurality of nucleic acids are disposed on a plurality of beads, rather than on a unitary planar substrate, as is described, inter alia, in Brenner et al., Proc. Natl. Acad. Sci. USA 97(4):1665-1670 (2000). Examples of nucleic acid microarrays may be found in U.S. Pat. Nos. 6,391,623, 6,383,754, 6,383,749, 6,380,377, 6,379,897, 6,376,191, 6,372,431, 6,351,712 6,344,316, 6,316,193, 6,312,906, 6,309,828, 6,309,824, 6,306,643, 6,300,063, 6,287,850, 6,284,497, 6,284,465, 6,280,954, 6,262,216, 6,251,601, 6,245,518, 6,263,287, 6,251,601, 6,238,866, 6,228,575, 6,214,587, 6,203,989, 6,171,797, 6,103,474, 6,083,726, 6,054,274, 6,040,138, 6,083,726, 6,004,755, 6,001,309, 5,958,342, 5,952,180, 5,936,731, 5,843,655, 5,814,454, 5,837,196, 5,436,327, 5,412,087, and 5,405,783, the disclosures of which are incorporated herein by reference in their entireties.

[0073] In an alternative embodiment, a “microarray” may also refer to a “peptide microarray” or “protein microarray” having a substrate-bound collection or plurality of polypeptides, the binding to each of the plurality of bound polypeptides being separately detectable. Alternatively, the peptide microarray may have a plurality of binders, including but not limited to monoclonal antibodies, polyclonal antibodies, phage display binders, yeast 2 hybrid binders, and aptamers, which can specifically detect the binding of the polypeptides of this invention. The array may be based on autoantibody detection to the polypeptides of this invention, see Robinson et al., Nature Medicine 8(3):295-301 (2002). Examples of peptide arrays may be found in WO 02/31463, WO 02/25288, WO 01/94946, WO 01/88162, WO 01/68671, WO 01/57259, WO 00/61806, WO 00/54046, WO 00/47774, WO 99/40434, WO 99/39210, and WO 97/42507 and U.S. Pat. Nos. 6,268,210, 5,766,960, and 5,143,854, the disclosures of which are incorporated herein by reference in their entireties.

[0074] In addition, determination of the levels of the CSNA or CSP may be made in a multiplex manner using techniques described in WO 02/29109, WO 02/24959, WO 01/83502, WO01/73113, WO 01/59432, WO 01/57269, and WO 99/67641, the disclosures of which are incorporated herein by-reference in their entireties.

[0075] The term “mutant”, “mutated”, or “mutation” when applied to nucleic acid sequences means that nucleotides in a nucleic acid sequence may be inserted, deleted or changed compared to a reference nucleic acid sequence. A single alteration may be made at a locus (a point mutation) or multiple nucleotides may be inserted, deleted or changed at a single locus. In addition, one or more alterations may be made at any number of loci within a nucleic acid sequence. In a preferred embodiment of the present invention, the nucleic acid sequence is the wild type nucleic acid sequence encoding a CSP or is a CSNA. The nucleic acid sequence may be mutated by any method known in the art including those mutagenesis techniques described infra.

[0076] The term “error-prone PCR” refers to a process for performing PCR under conditions where the copying fidelity of the DNA polymerase is low, such that a high rate of point mutations is obtained along the entire length of the PCR product. See, e.g., Leung et al., Technique 1: 11-15 (1989) and Caldwell et al., PCR Methods Applic. 2: 28-33 (1992).

[0077] The tern “oligonucleotide-directed mutagenesis” refers to a process which enables the generation of site-specific mutations in any cloned DNA segment of interest. See, e.g., Reidhaar-Olson et al., Science 241: 53-57 (1988).

[0078] The term “assembly PCR” refers to a process which involves the assembly of a PCR product from a mixture of small DNA fragments. A large number of different PCR reactions occur in parallel in the same vial, with the products of one reaction priming the products of another reaction.

[0079] The term “sexual PCR mutagenesis” or “DNA shuffling” refers to a method of error-prone PCR coupled with forced homologous recombination between DNA molecules of different but highly related DNA sequence in vitro, caused by random fragmentation of the DNA molecule based on sequence similarity, followed by fixation of the crossover by primer extension in an error-prone PCR reaction. See, e.g., Stemmer, Proc. Natl. Acad. Sci. U.S.A. 91: 10747-10751(1994). DNA shuffling can be carried out between several related genes (“Family shuffling”).

[0080] The term “in vivo mutagenesis” refers to a process of generating random mutations in any cloned DNA of interest which involves the propagation of the DNA in a strain of bacteria such as E. coli that carries mutations in one or more of the DNA repair pathways. These “mutator” strains have a higher random mutation rate than that of a wild-type parent. Propagating the DNA in a mutator strain will eventually generate random mutations within the DNA.

[0081] The term “cassette mutagenesis” refers to any process for replacing a small region of a double-stranded DNA molecule with a synthetic oligonucleotide “cassette” that differs from the native sequence. The oligonucleotide often contains completely and/or partially randomized native sequence.

[0082] The term “recursive ensemble mutagenesis” refers to an algorithm for protein engineering (protein mutagenesis) developed to produce diverse populations of phenotypically related mutants whose members differ in amino acid sequence. This method uses a feedback mechanism to control successive rounds of combinatorial cassette mutagenesis. See, e.g., Arkin et al., Proc. Natl. Acad. Sci. U.S.A. 89: 7811-7815 (1992).

[0083] The term “exponential ensemble mutagenesis” refers to a process for generating combinatorial libraries with a high percentage of unique and functional mutants, wherein small groups of residues are randomized in parallel to identify, at each altered position, amino acids which lead to functional proteins. See, e.g., Delegrave et al., Biotechnology Research 11: 1548-1552 (1993); Arnold, Current Opinion in Biotechnology 4: 450-455 (1993).

[0084] “Operatively linked” expression control sequences refers to a linkage in which the expression control sequence is either contiguous with the gene of interest to control the gene of interest, or acts in traits or at a distance to control the gene of interest.

[0085] The term “expression control sequence” as used herein refers to polynucleotide sequences which are necessary to affect the expression of coding sequences to which they are operatively linked. Expression control sequences are sequences which control the transcription, post-transcriptional events and translation of nucleic acid sequences. Expression control sequences include appropriate transcription initiation, termination, promoter and enhancer sequences; efficient RNA processing signals such as splicing and polyadenylation signals; sequences that stabilize cytoplasmic mRNA; sequences that enhance translation efficiency (e.g., ribosome binding sites); sequences that enhance protein stability; and when desired, sequences that enhance protein secretion. The nature of such control sequences differs depending upon the host organism; in prokaryotes, such control sequences generally include promoter, ribosomal binding site, and transcription termination sequence. The term “control sequences” is intended to include, at a minimum, all components whose presence is essential for expression, and can also include additional components whose presence is advantageous, for example, leader sequences and fusion partner sequences.

[0086] The term “vector,” as used herein, is intended to refer to a nucleic acid molecule capable of transporting another nucleic acid to which it has been linked. One type of vector is a “plasmid”, which refers to a circular double-stranded DNA loop into which additional DNA segments may be ligated. Other vectors include cosmids, bacterial artificial chromosomes (BAC) and yeast artificial chromosomes (YAC). Another type of vector is a viral vector, wherein additional DNA segments may be ligated into the viral genome. Viral vectors that infect bacterial cells are referred to as bacteriophages. Certain vectors are capable of autonomous replication in a host cell into which they are introduced (e.g., bacterial vectors having a bacterial origin of replication). Other vectors can be integrated into the genome of a host cell upon introduction into the host cell, and thereby are replicated along with the host genome. Moreover, certain vectors are capable of directing the expression of genes to which they are operatively linked. Such vectors are referred to herein as “recombinant expression vectors” (or simply, “expression vectors”). In general, expression vectors of utility in recombinant DNA techniques are often in the form of plasmids. In the present specification, “plasmid” and “vector” may be used interchangeably as the plasmid is the most commonly used form of vector. However, the invention is intended to include other forms of expression vectors that serve equivalent functions.

[0087] The term “recombinant host cell” (or simply “host cell”), as used herein, is intended to refer to a cell into which a recombinant expression vector has been introduced. It should be understood that such terms are intended to refer not only to the particular subject cell but also to the progeny of such a cell. Because certain modifications may occur in succeeding generations due to either mutation or environmental influences, such progeny may not, in fact, be identical to the parent cell, but are still included within the scope of the term “host cell” as used herein.

[0088] As used herein, the phrase “open reading frame” and the equivalent acronym “ORF” refers to that portion of a transcript-derived nucleic acid that can be translated in its entirety into a sequence of contiguous amino acids. As so defined, an ORF has length, measured in nucleotides, exactly divisible by 3. As so defined, an ORF need not encode the entirety of a natural protein.

[0089] As used herein, the phrase “ORF-encoded peptide” refers to the predicted or actual translation of an ORF.

[0090] As used herein, the phrase “degenerate variant” of a reference nucleic acid sequence is meant to be inclusive of all nucleic acid sequences that can be directly translated, using the standard genetic code, to provide an amino acid sequence identical to that translated from the reference nucleic acid sequence.

[0091] The term “polypeptide” encompasses both naturally occurring and non-naturally occurring proteins and polypeptides, as well as polypeptide fragments and polypeptide mutants, derivatives and analogs thereof. A polypeptide may be monomeric or polymeric. Further, a polypeptide may comprise a number of different modules within a single polypeptide each of which has one or more distinct activities. A preferred polypeptide in accordance with the invention comprises a CSP encoded by a nucleic acid molecule of the instant invention, or a fragment, mutant, analog or derivative thereof.

[0092] The term “isolated protein” or “isolated polypeptide” is a protein or polypeptide that by virtue of its origin or source of derivation (1) is not associated with naturally associated components that accompany it in its native state, (2) is free of other proteins from the same species (3) is expressed by a cell from a different species, or (4) does not occur in nature. Thus, a polypeptide that is chemically synthesized or synthesized in a cellular system different from the cell from which it naturally originates will be “isolated” from its naturally associated components. A polypeptide or protein may also be rendered substantially free of naturally associated components by isolation, using protein purification techniques well known in the art.

[0093] A protein or polypeptide is “substantially pure,” “substantially homogeneous” or “substantially purified” when at least about 60% to 75% of a sample exhibits a single species of polypeptide. The polypeptide or protein may be monomeric or multimeric. A substantially pure polypeptide or protein will typically comprise about 50%, 60%, 70%, 80% or 90% W/W of a protein sample, more usually about 95% and preferably will be over 99% pure. Protein purity or homogeneity may be determined by a number of means well known in the art, such as polyacrylamide gel electrophoresis of a protein sample, followed by visualizing a single polypeptide band upon staining the gel with a stain well known in the art. For certain purposes, higher resolution may be provided by using HPLC or other means well known in the art for purification.

[0094] The term “fragment” when used herein with respect to polypeptides of the present invention refers to a polypeptide that has an amino-terminal and/or carboxy-terminal deletion compared to a full-length CSP. In a preferred embodiment, the fragment is a contiguous sequence in which the amino acid sequence of the fragment is identical to the corresponding positions in the naturally occurring polypeptide. Fragments typically are at least 5, 6, 7, 8, 9 or 10 amino acids long, preferably at least 12, 14, 16 or 18 amino acids long, more preferably at least 20 amino acids long, more preferably at least 25, 30, 35, 40 or 45, amino acids, even more preferably at least 50 or 60 amino acids long, and even more preferably at least 70 amino acids long.

[0095] A “derivative” when used herein with respect to polypeptides of the present invention refers to a polypeptide which is substantially similar in primary structural sequence to a CSP but which includes, e.g., in vivo or in vitro chemical and biochemical modifications that are not found in the CSP. Such modifications include, for example, acetylation, acylation, ADP-ribosylation, amidation, covalent attachment of flavin, covalent attachment of a heme moiety, covalent attachment of a nucleotide or nucleotide derivative, covalent attachment of a lipid or lipid derivative, covalent attachment of phosphotidylinositol, cross-linking, cyclization, disulfide bond formation, demethylation, formation of covalent cross-links, formation of cystine, formation of pyroglutamate, formylation, gamma-carboxylation, glycosylation, GPI anchor formation, hydroxylation, iodination, methylation, myristoylation, oxidation, proteolytic processing, phosphorylation, prenylation, racemization, selenoylation, sulfation, transfer-RNA mediated addition of amino acids to proteins such as arginylation, and ubiquitination. Other modifications include, e.g., labeling with radionuclides, and various enzymatic modifications, as will be readily appreciated by those skilled in the art. A variety of methods for labeling polypeptides and of substituents or labels useful for such purposes are well known in the art, and include radioactive isotopes such as ¹²⁵I, ³²P, ³⁵S, ¹⁴C and ³H, ligands which bind to labeled antiligands (e.g., antibodies), fluorophores, chemiluminescent agents, enzymes, and antiligands which can serve as specific binding pair members for a labeled ligand. The choice of label depends on the sensitivity required, ease of conjugation with the primer, stability requirements, and available instrumentation. Methods for labeling polypeptides are well known in the art. See Ausubel (1992), supra; Ausubel (1999), supra.

[0096] The term “fusion protein” refers to polypeptides of the present invention coupled to a heterologous amino acid sequence. Fusion proteins are useful because they can be constructed to contain two or more desired functional elements from two or more different proteins. A fusion protein comprises at least 10 contiguous amino acids from a polypeptide of interest, more preferably at least 20 or 30 amino acids, even more preferably at least 40, 50 or 60 amino acids, yet more preferably at least 75, 100 or 125 amino acids. Fusion proteins can be produced recombinantly by constructing a nucleic acid sequence that encodes the polypeptide or a fragment thereof in frame with a nucleic acid sequence encoding a different protein or peptide and then expressing the fusion protein. Alternatively, a fusion protein can be produced chemically by crosslinking the polypeptide or a fragment thereof to another protein.

[0097] The term “analog” refers to both polypeptide analogs and non-peptide analogs. The term “polypeptide analog” as used herein refers to a polypeptide that is comprised of a segment of at least 25 amino acids that has substantial identity to a portion of an amino acid sequence but which contains non-natural amino acids or non-natural inter-residue bonds. In a preferred embodiment, the analog has the same or similar biological activity as the native polypeptide. Typically, polypeptide analogs comprise a conservative amino acid substitution (or insertion or deletion) with respect to the naturally occurring sequence. Analogs typically are at least 20 amino acids long, preferably at least 50 amino acids long or longer, and can often be as long as a full-length naturally occurring polypeptide.

[0098] The term “non-peptide analog” refers to a compound with properties that are analogous to those of a reference polypeptide. A non-peptide compound may also be termed a “peptide mimetic” or a “peptidomimetic.” Such compounds are often developed with the aid of computerized molecular modeling. Peptide mimetics that are structurally similar to useful peptides may be used to produce an equivalent effect. Generally, peptidomimetics are structurally similar to a paradigm polypeptide (i.e., a polypeptide that has a desired biochemical property or pharmacological activity), but have one or more peptide linkages optionally replaced by a linkage selected from the group consisting of: —CH₂NH—, —CH₂S—, —CH₂—CH₂—, —CH═CH-(cis and trans), —COCH₂—, —CH(OH)CH₂—, and CH₂SO—, by methods well known in the art. Systematic substitution of one or more amino acids of a consensus sequence with a D-amino acid of the same type (e.g., D-lysine in place of L-lysine) may also be used to generate more stable peptides. In addition, constrained peptides comprising a consensus sequence or a substantially identical consensus sequence variation may be generated by methods known in the art (Rizo et al., Ann. Rev. Biochem. 61:387-418 (1992)). For example, one may add internal cysteine residues capable of forming intramolecular disulfide bridges which cyclize the peptide.

[0099] The term “mutant” or “mutein” when referring to a polypeptide of the present invention relates to an amino acid sequence containing substitutions, insertions or deletions of one or more amino acids compared to the amino acid sequence of a CSP. A mutein may have one or more amino acid point substitutions, in which a single amino acid at a position has been changed to another amino acid, one or more insertions and/or deletions, in which one or more amino acids are inserted or deleted, respectively, in the sequence of the naturally occurring protein, and/or truncations of the amino acid sequence at either or both the amino or carboxy termini. Further, a mutein may have the same or different biological activity as the naturally occurring protein. For instance, a mutein may have an increased or decreased biological activity. A mutein has at least 50% sequence similarity to the wild type protein, preferred is 60% sequence similarity, more preferred is 70% sequence similarity. Even more preferred are muteins having 80%, 85% or 90% sequence similarity to a CSP. In an even more preferred embodiment, a mutein exhibits 95% sequence identity, even more preferably 97%, even more preferably 98% and even more preferably 99%. Sequence similarity may be measured by any common sequence analysis algorithm, such as GAP or BESTFIT or other variation Smith-Waterman alignment. See, T. F. Smith and M. S. Waterman, J. Mol. Biol. 147:195-197 (1981) and W. R. Pearson, Genomics 11:635-650 (1991).

[0100] Preferred amino acid substitutions are those which: (1) reduce susceptibility to proteolysis, (2) reduce susceptibility to oxidation, (3) alter binding affinity for forming protein complexes, (4) alter binding affinity or enzymatic activity, and (5) confer or modify other physicochemical or functional properties of such analogs. For example, single or multiple amino acid substitutions (preferably conservative amino acid substitutions) may be made in the naturally occurring sequence (preferably in the portion of the polypeptide outside the domain(s) forming intermolecular contacts. In a preferred embodiment, the amino acid substitutions are moderately conservative substitutions or conservative substitutions. In a more preferred embodiment, the amino acid substitutions are conservative substitutions. A conservative amino acid substitution should not substantially change the structural characteristics of the parent sequence (e.g., a replacement amino acid should not tend to disrupt a helix that occurs in the parent sequence, or disrupt other types of secondary structure that characterize the parent sequence). Examples of art-recognized polypeptide secondary and tertiary structures are described in Creighton (ed.), Proteins, Structures and Molecular Principles, W. H. Freeman and Company (1984); Branden et al. (ed.), Introduction to Protein Structure, Garland Publishing (1991); Thornton et al., Nature 354:105-106 (1991).

[0101] As used herein, the twenty conventional amino acids and their abbreviations follow conventional usage. See Golub et al. (eds.), Immunology—A Synthesis 2^{nd} Ed., Sinauer Associates (1991). Stereoisomers (e.g., D-amino acids) of the twenty conventional amino acids, unnatural amino acids such as α-, α-disubstituted amino acids, N-alkyl amino acids, and other unconventional amino acids may also be suitable components for polypeptides of the present invention. Examples of unconventional amino acids include: 4-hydroxyproline, γ-carboxyglutamate, ε-N,N,N-trimethyllysine, ε-N-acetyllysine, O-phosphoserine, N-acetylserine, N-formylmethionine, 3-methylhistidine, 5-hydroxylysine, s-N-methylarginine, and other similar amino acids and imino acids (e.g., 4-hydroxyproline). In the polypeptide notation used herein, the lefthand direction is the amino terminal direction and the right hand direction is the carboxy-terminal direction, in accordance with standard usage and convention.

[0102] By “homology” or “homologous” when referring to a polypeptide of the present invention it is meant polypeptides from different organisms with a similar sequence to the encoded amino acid sequence of a CSP and a similar biological activity or function. Although two polypeptides are said to be “homologous,” this does not imply that there is necessarily an evolutionary relationship between the polypeptides. Instead, the term “homologous” is defined to mean that the two polypeptides have similar amino acid sequences and similar biological activities or functions. In a preferred embodiment, a homologous polypeptide is one that exhibits 50% sequence similarity to CSP, preferred is 60% sequence similarity, more preferred is 70% sequence similarity. Even more preferred are homologous polypeptides that exhibit 80%, 85% or 90% sequence similarity to a CSP. In yet a more preferred embodiment, a homologous polypeptide exhibits 95%, 97%, 98% or 99% sequence similarity.

[0103] When “sequence similarity” is used in reference to polypeptides, it is recognized that residue positions that are not identical often differ by conservative amino acid substitutions. In a preferred embodiment, a polypeptide that has “sequence similarity” comprises conservative or moderately conservative amino acid substitutions. A “conservative amino acid substitution” is one in which an amino acid residue is substituted by another amino acid residue having a side chain (R group) with similar chemical properties (e.g., charge or hydrophobicity). In general, a conservative amino acid substitution will not substantially change the functional properties of a protein. In cases where two or more amino acid sequences differ from each other by conservative substitutions, the percent sequence identity or degree of similarity may be adjusted upwards to correct for the conservative nature of the substitution. Means for making this adjustment are well known to those of skill in the art. See, e.g., Pearson, Methods Mol. Biol. 24: 307-31 (1994).

[0104] For instance, the following six groups each contain amino acids that are conservative substitutions for one another:

[0105] 1) Serine (S), Threonine (T);

[0106] 2) Aspartic Acid (D), Glutamic Acid (E);

[0107] 3) Asparagine (N), Glutamine (Q);

[0108] 4) Arginine (R), Lysine (K);

[0109] 5) Isoleucine (I), Leucine (L), Methionine (M), Alanine (A), Valine (V), and

[0110] 6) Phenylalanine (F), Tyrosine (Y), Tryptophan (W).

[0111] Alternatively, a conservative replacement is any change having a positive value in the PAM250 log-likelihood matrix disclosed in Gonnet et al., Science 256: 1443-45 (1992). A “moderately conservative” replacement is any change having a nonnegative value in the PAM250 log-likelihood matrix.

[0112] Sequence similarity for polypeptides, which is also referred to as sequence identity, is typically measured using sequence analysis software. Protein analysis software matches similar sequences using measures of similarity assigned to various substitutions, deletions and other modifications, including conservative amino acid substitutions. For instance, GCG contains programs such as “Gap” and “Bestfit” which can be used with default parameters to determine sequence homology or sequence identity between closely related polypeptides, such as homologous polypeptides from different species of organisms or between a wild type protein and a mutein thereof. See, e.g., GCG Version 6.1. Other programs include FASTA, discussed supra.

[0113] A preferred algorithm when comparing a sequence of the invention to a database containing a large number of sequences from different organisms is the computer program BLAST, especially blastp or tblastn. See, e.g., Altschul et al., J. Mol. Biol. 215: 403-410 (1990); Altschul et al., Nucleic Acids Res. 25:3389-402 (1997). Preferred parameters for blastp are:

[0114] Expectation value: 10 (default)

[0115] Filter: seg (default)

[0116] Cost to open a gap: 11 (default)

[0117] Cost to extend a gap: 1 (default

[0118] Max. alignments: 100 (default)

[0119] Word size: 11 (default)

[0120] No. of descriptions: 100 (default)

[0121] Penalty Matrix: BLOSUM62

[0122] The length of polypeptide sequences compared for homology will generally be at least about 16 amino acid residues, usually at least about 20 residues, more usually at least about 24 residues, typically at least about 28 residues, and preferably more than about 35 residues. When searching a database containing sequences from a large number of different organisms, it is preferable to compare amino acid sequences.

[0123] Algorithms other than blastp for database searching using amino acid sequences are known in the art. For instance, polypeptide sequences can be compared using FASTA, a program in GCG Version 6.1. FASTA (e.g., FASTA2 and FASTA3) provides alignments and percent sequence identity of the regions of the best overlap between the query and search sequences (Pearson (1990), supra; Pearson (2000), supra. For example, percent sequence identity between amino acid sequences can be determined using FASTA with its default or recommended parameters (a word size of 2 and the PAM250 scoring matrix), as provided in GCG Version 6.1.

[0124] An “antibody” refers to an intact immunoglobulin, or to an antigen-binding portion thereof that competes with the intact antibody for specific binding to a molecular species, e.g., a polypeptide of the instant invention. Antigen-binding portions may be produced by recombinant DNA techniques or by enzymatic or chemical cleavage of intact antibodies. Antigen-binding portions include, inter alia, Fab, Fab′, F(ab′)₂, Fv, dAb, and complementarity determining region (CDR) fragments, single-chain antibodies (scFv), chimeric antibodies, diabodies and polypeptides that contain at least a portion of an immunoglobulin that is sufficient to confer specific antigen binding to the polypeptide. A Fab fragment is a monovalent fragment consisting of the VL, VH, CL and CH1 domains; a F(ab′)₂ fragment is a bivalent fragment comprising two Fab fragments linked by a disulfide bridge at the hinge region; a Fd fragment consists of the VH and CH1 domains; a Fv fragment consists of the VL and VH domains of a single arm of an antibody; and a dAb fragment consists of a VH domain. See, e.g., Ward et al., Nature 341: 544-546 (1989).

[0125] By “bind specifically” and “specific binding” as used herein it is meant the ability of the antibody to bind to a first molecular species in preference to binding to other molecular species with which the antibody and first molecular species are admixed. An antibody is said to “recognize” a first molecular species when it can bind specifically to that first molecular species.

[0126] A single-chain antibody (scFv) is an antibody in which VL and VH regions are paired to form a monovalent molecule via a synthetic linker that enables them to be made as a single protein chain. See, e.g., Bird et al., Science 242: 423-426 (1988); Huston et al., Proc. Natl. Acad. Sci. USA 85: 5879-5883 (1988). Diabodies are bivalent, bispecific antibodies in which VH and VL domains are expressed on a single polypeptide chain, but using a linker that is too short to allow for pairing between the two domains on the same chain, thereby forcing the domains to pair with complementary domains of another chain and creating two antigen binding sites. See e.g., Holliger et al., Proc. Natl. Acad. Sci. USA 90: 6444-6448 (1993); Poljak et al., Structure 2: 1121-1123 (1994). One or more CDRs may be incorporated into a molecule either covalently or noncovalently to make it an immunoadhesin. An immunoadhesin may incorporate the CDR(s) as part of a larger polypeptide chain, may covalently link the CDR(s) to another polypeptide chain, or may incorporate the CDR(s) noncovalently. The CDRs permit the immunoadhesin to specifically bind to a particular antigen of interest. A chimeric antibody is an antibody that contains one or more regions from one antibody and one or more regions from one or more other antibodies.

[0127] An antibody may have one or more binding sites. If there is more than one binding site, the binding sites may be identical to one another or may be different. For instance, a naturally occurring immunoglobulin has two identical binding sites, a single-chain antibody or Fab fragment has one binding site, while a “bispecific” or “bifunctional” antibody has two different binding sites.

[0128] An “isolated antibody” is an antibody that (1) is not associated with naturally-associated components, including other naturally-associated antibodies, that accompany it in its native state, (2) is free of other proteins from the same species, (3) is expressed by a cell from a different species, or (4) does not occur in nature. It is known that purified proteins, including purified antibodies, may be stabilized with non-naturally-associated components. The non-naturally-associated component may be a protein, such as albumin (e.g., BSA) or a chemical such as polyethylene glycol (PEG).

[0129] A “neutralizing antibody” or “an inhibitory antibody” is an antibody that inhibits the activity of a polypeptide or blocks the binding of a polypeptide to a ligand that normally binds to it. An “activating antibody” is an antibody that increases the activity of a polypeptide.

[0130] The term “epitope” includes any protein determinant capable of specific binding to an immunoglobulin or T-cell receptor. Epitopic determinants usually consist of chemically active surface groupings of molecules such as amino acids or sugar side chains and usually have specific three-dimensional structural characteristics, as well as specific charge characteristics. An antibody is said to specifically bind an antigen when the dissociation constant is less than 1 μM, preferably less than 100 nM and most preferably less than 10 nM.

[0131] The term “patient” includes human and veterinary subjects.

[0132] Throughout this specification and claims, the word “comprise,” or variations such as “comprises” or “comprising,” will be understood to imply the inclusion of a stated integer or group of integers but not the exclusion of any other integer or group of integers.

[0133] The term “colon specific” refers to a nucleic acid molecule or polypeptide that is expressed predominantly in the colon as compared to other tissues in the body. In a preferred embodiment, a “colon specific” nucleic acid molecule or polypeptide is detected at a level that is 1.5-fold higher than any other tissue in the body. In a more preferred embodiment, the “colon specific” nucleic acid molecule or polypeptide is detected at a level that is 2-fold higher than any other tissue in the body, more preferably 5-fold higher, still more preferably at least 10-fold, 15-fold, 20-fold, 25-fold, 50-fold or 100-fold higher than any other tissue in the body. Nucleic acid molecule levels may be measured by nucleic acid hybridization, such as Northern blot hybridization, or quantitative PCR. Polypeptide levels may be measured by any method known to accurately quantitate protein levels, such as Western blot analysis.

Nucleic Acid Molecules, Regulatory Sequences, Vectors, Host Cells and Recombinant Methods of Making Polypeptides

[0134] Nucleic Acid Molecules

[0135] One aspect of the invention provides isolated nucleic acid molecules that are specific to the colon or to colon cells or tissue or that are derived from such nucleic acid molecules. These isolated colon specific nucleic acids (CSNAs) may comprise cDNA genomic DNA, RNA, or a combination thereof, a fragment of one of these nucleic acids, or may be a non-naturally occurring nucleic acid molecule. A CSNA may be derived from an animal. In a preferred embodiment, the CSNA is derived from a human or other mammal. In a more preferred embodiment, the CSNA is derived from a human or other primate. In an even more preferred embodiment, the CSNA is derived from a human.

[0136] In a preferred embodiment, the nucleic acid molecule encodes a polypeptide that is specific to colon, a colon-specific polypeptide (CSP). In a more preferred embodiment, the nucleic acid molecule encodes a polypeptide that comprises an amino acid sequence of SEQ ID NO: 96-237. In another highly preferred embodiment, the nucleic acid molecule comprises a nucleic acid sequence of SEQ ID NO: 1-95. Nucleotide sequences of the instantly-described nucleic acid molecules were determined by assembling several DNA molecules from either public or proprietary databases. Some of the underlying DNA sequences are the result, directly or indirectly, of at least one enzymatic polymerization reaction (e.g., reverse transcription and/or polymerase chain reaction) using an automated sequencer (such as the MegaBACE™ 1000, Amersham Biosciences, Sunnyvale, Calif., USA).

[0137] Nucleic acid molecules of the present invention may also comprise sequences that selectively hybridize to a nucleic acid molecule encoding a CSNA or a complement or antisense thereof. The hybridizing nucleic acid molecule may or may not encode a polypeptide or may or may not encode a CSP. However, in a preferred embodiment, the hybridizing nucleic acid molecule encodes a CSP. In a more preferred embodiment, the invention provides a nucleic acid molecule that selectively hybridizes to a nucleic acid molecule or the antisense sequence of a nucleic acid molecule that encodes a polypeptide comprising an amino acid sequence of SEQ ID NO: 96-237. In an even more preferred embodiment, the invention provides a nucleic acid molecule that selectively hybridizes to a nucleic acid molecule comprising the-nucleic acid sequence of SEQ ID NO: 1-95 or the antisense sequence thereof. Preferably, the nucleic acid molecule selectively hybridizes to a nucleic acid molecule or the antisense sequence of a nucleic acid molecule encoding a CSP under low stringency conditions. More preferably, the nucleic acid molecule selectively hybridizes to a nucleic acid molecule or the antisense sequence of a nucleic acid molecule encoding a CSP under moderate stringency conditions. Most preferably, the nucleic acid molecule selectively hybridizes to a nucleic acid molecule or the antisense sequence of a nucleic acid molecule encoding a CSP under high stringency conditions. In a preferred embodiment, the nucleic acid molecule hybridizes under low, moderate or high stringency conditions to a nucleic acid molecule or the antisense sequence of a nucleic acid molecule encoding a polypeptide comprising an amino acid sequence of SEQ ID NO: 96-237. In a more preferred embodiment, the nucleic acid molecule hybridizes under low, moderate or high stringency conditions to a nucleic acid molecule or the antisense sequence of a nucleic acid molecule comprising a nucleic acid sequence selected from SEQ ID NO: 1-95.

[0138] Nucleic acid molecules of the present invention may also comprise nucleic acid sequences that exhibit substantial sequence similarity to a nucleic acid encoding a CSP or a complement of the encoding nucleic acid molecule. In this embodiment, it is preferred that the nucleic acid molecule exhibit substantial sequence similarity to a nucleic acid molecule encoding human CSP. More preferred is a nucleic acid molecule exhibiting substantial sequence similarity to a nucleic acid molecule encoding a polypeptide having an amino acid sequence of SEQ ID NO: 96-237. By substantial sequence similarity it is meant a nucleic acid molecule having at least 60%, more preferably at least 70%, even more preferably at least 80% and even more preferably at least 85% sequence identity with a nucleic acid molecule encoding a CSP, such as a polypeptide having an amino acid sequence of SEQ ID NO: 96-237. In a more preferred embodiment, the similar nucleic acid molecule is one that has at least 90%, more preferably at least 95%, more preferably at least 97%, even more preferably at least 98%, and still more preferably at least 99% sequence identity with a nucleic acid molecule encoding a CSP. Most preferred in this embodiment is a nucleic acid molecule that has at least 99.5%, 99.6%, 99.7%, 99.8% or 99.9% sequence identity with a nucleic acid molecule encoding a CSP.

[0139] The nucleic acid molecules of the present invention are also inclusive of those exhibiting substantial sequence similarity to a CSNA or its complement. In this embodiment, if is preferred that the nucleic acid molecule exhibit substantial sequence similarity to a nucleic acid molecule having a nucleic acid sequence of SEQ ID NO: 1-95. By substantial sequence similarity it is meant a nucleic acid molecule that has at least 60%, more preferably at least 70%, even more preferably at least 80% and even more preferably at least 85% sequence identity with a CSNA, such as one having a nucleic acid sequence of SEQ ID NO: 1-95. More preferred is a nucleic acid molecule that has at least 90%, more preferably at least 95%, more preferably at least 97%, even more preferably at least 98%, and still more preferably at least 99% sequence identity with a CSNA. Most preferred is a nucleic acid molecule that has at least 99.5%, 99.6%, 99.7%, 99.8% or 99.9% sequence identity with a CSNA.

[0140] Nucleic acid molecules that exhibit substantial sequence similarity are inclusive of sequences that exhibit sequence identity over their entire length to a CSNA or to a nucleic acid molecule encoding a CSP, as well as sequences that are similar over only a part of its length. In this case, the part is at least 50 nucleotides of the CSNA or the nucleic acid molecule encoding a CSP, preferably at least 100 nucleotides, more preferably at least 150 or 200 nucleotides, even more preferably at least 250 or 300 nucleotides, still more preferably at least 400 or 500 nucleotides.

[0141] The substantially similar nucleic acid molecule may be a naturally occurring one that is derived from another species, especially one derived from another primate, wherein the similar nucleic acid molecule encodes an amino acid sequence that exhibits significant sequence identity to that of SEQ ID NO: 96-237 or demonstrates significant sequence identity to the nucleotide sequence of SEQ ID NO: 1-95. The similar nucleic acid molecule may also be a naturally occurring nucleic acid molecule from a human, when the CSNA is a member of a gene family. The similar nucleic acid molecule may also be a naturally occurring nucleic acid molecule derived from a non-primate, mammalian species, including without limitation, domesticated species, e.g., dog, cat, mouse, rat, rabbit, hamster, cow, horse and pig; and wild animals, e.g., monkey, fox, lions, tigers, bears, giraffes, zebras, etc. The substantially similar nucleic acid molecule may also be a naturally occurring nucleic acid molecule derived from a non-mammalian species, such as birds or reptiles. The naturally occurring substantially similar nucleic acid molecule may be isolated directly from humans or other species. In another embodiment, the substantially similar nucleic acid molecule may be one that is experimentally produced by random mutation of a nucleic acid molecule. In another embodiment, the substantially similar nucleic acid molecule may be one that-is experimentally produced by directed mutation of a CSNA. In a preferred embodiment, the substantially similar nucleic acid molecule is a CSNA.

[0142] The nucleic acid molecules of the present invention are also inclusive of allelic variants of a CSNA or a nucleic acid encoding a CSP. For example, single nucleotide polymorphisms (SNPs) occur frequently in eukaryotic genomes and the sequence determined from one individual of a species may differ from other allelic forms present within the population. More than 1.4 million SNPs have already been identified in the human genome, International Human Genome Sequencing Consortium, Nature 409: 860-921 (2001)—Variants with small deletions and insertions of more than a single nucleotide are also found in the general population, and often do not alter the function of the protein. In addition, amino acid substitutions occur frequently among natural allelic variants, and often do not substantially change protein function.

[0143] In a preferred embodiment, the allelic variant is a variant of a gene, wherein the gene is transcribed into a mRNA that encodes a CSP. In a more preferred embodiment, the gene is transcribed into a mRNA that encodes a CSP comprising an amino acid sequence of SEQ ID NO: 96-237. In another preferred embodiment, the allelic variant is a variant of a gene, wherein the gene is transcribed into a mRNA that is a CSNA. In a more preferred embodiment, the gene is transcribed into an mRNA that comprises the nucleic acid sequence of SEQ ID NO: 1-95. Also preferred is that the allelic variant be a naturally occurring allelic variant in the species of interest, particularly human.

[0144] Nucleic acid molecules of the present invention are also inclusive of nucleic acid sequences comprising a part of a nucleic acid sequence of the instant invention. The part may or may not encode a polypeptide, and may or may not encode a polypeptide that is a CSP. In a preferred embodiment, the part encodes a CSP. In one embodiment, the nucleic acid molecule comprises a part of a CSNA. In another embodiment, the nucleic acid molecule comprises a part of a nucleic acid molecule that hybridizes or exhibits substantial sequence similarity to a CSNA. In another embodiment, the nucleic acid molecule comprises a part of a nucleic acid molecule that is an allelic variant of a CSNA. In yet another embodiment, the nucleic acid molecule comprises a part of a nucleic acid molecule that encodes a CSP. A part comprises at least 10 nucleotides, more preferably at least 15, 17, 18, 20, 25, 30, 35, 40, 50, 60, 70, 80, 90, 100, 150, 200, 250, 300, 350, 400 or 500 nucleotides. The maximum size of a nucleic acid part is one nucleotide shorter than the sequence of the nucleic acid molecule encoding the full-length protein.

[0145] Nucleic acid molecules of the present invention are also inclusive of nucleic acid sequences that encode fusion proteins, homologous proteins, polypeptide fragments, muteins and polypeptide analogs, as described infra.

[0146] Nucleic acid molecules of the present invention are also inclusive of nucleic acid sequences containing modifications of the native nucleic acid molecule. Examples of such modifications include, but are not limited to, nonnative internucleoside bonds, post-synthetic modifications or altered nucleotide analogues. One having ordinary skill in the art would recognize that the type of modification that may be made will depend upon the intended use of the nucleic acid molecule. For instance, when the nucleic acid molecule is used as a hybridization probe, the range of such modifications will be limited to those that permit sequence-discriminating base pairing of the resulting nucleic acid. When used to direct expression of RNA or protein in vitro or in vivo, the range of such modifications will be limited to those that permit the nucleic acid to function properly as a polymerization substrate. When the isolated nucleic acid is used as a therapeutic agent, the modifications will be limited to those that do not confer toxicity upon the isolated nucleic acid.

[0147] Accordingly, in one embodiment, a nucleic acid molecule may include nucleotide analogues that incorporate labels that are directly detectable, such as radiolabels or fluorophores, or nucleotide analogues that incorporate labels that can be visualized in a subsequent reaction, such as biotin or various haptens. The labeled nucleic acid molecules are particularly useful as hybridization probes.

[0148] Common radiolabeled analogues include those labeled with ³³P, ³²P, and ³⁵S, such as α-³²P-dATP, α-³²P-dCTP, α-³²P-dGTP, α-³²P-dTTP, α-³²P-3′dATP, α-³²P-ATP, α-³²P-CTP, α-³²P-GTP, α-³²P-UTP, α-³⁵S-dATP, γ-³⁵S-GTP, γ-³³P-dATP, and the like.

[0149] Commercially available fluorescent nucleotide analogues readily incorporated into the nucleic acids of the present invention include Cy3-dCTP, Cy3-dUTP, Cy5-dCTP, Cy3-dUTP (Amersham Biosciences, Piscataway, N.J., USA), fluorescein-12-dUTP, tetramethylrhodamine-6-dUTP, Texas Red®-5-dUTP, Cascade Blue®-7-dUTP, BODIPY® FL-14-dUTP, BODIPY® TMR-14-dUTP, BODIPY® TR-14-dUTP, Rhodamine Green™-5-dUTP, Oregon Green® 488-5-dUTP, Texas Red®-12-dUTP, BODIPY® 630/650-14-dUTP, BODIPY® 650/665-14-dUTP, Alexa Fluor® 488-5-dUTP, Alexa Fluor® 532-5-dUTP, Alexa Fluor®-568-5-dUTP, Alexa Fluor® 594-5-dUTP, Alexa Fluor® 546-14-dUTP, fluorescein-12-UTP, tetramethylrhodamine-6-UTP, Texas Red®-5-UTP, Cascade Blue®-7-UTP, BODIPY® FL-14-UTP, BODIPY® TMR-14-UTP, BODIPY® TR-14-UTP, Rhodamine Green™-5-UTP, Alexa Fluor® 488-5-UTP, Alexa Fluor® 546-14-UTP (Molecular Probes, Inc. Eugene, Oreg., USA). One may also custom synthesize nucleotides having other fluorophores. See Henegariu et al., Nature Biotechnol. 18: 345-348 (2000).

[0150] Haptens that are commonly conjugated to nucleotides for subsequent labeling include biotin (biotin-11-dUTP, Molecular Probes, Inc., Eugene, Oreg., USA; biotin-21-UTP, biotin-21-dUTP, Clontech Laboratories, Inc., Palo Alto, Calif., USA), digoxigenin (DIG-11-dUTP, alkali labile, DIG-11-UTP, Roche Diagnostics Corp., Indianapolis, Ind., USA), and dinitrophenyl (dinitrophenyl-11-dUTP, Molecular Probes, Inc., Eugene, Oreg., USA).

[0151] Nucleic acid molecules of the present invention can be labeled by incorporation of labeled nucleotide analogues into the nucleic acid. Such analogues can be incorporated by enzymatic polymerization, such as by nick translation, random priming, polymerase chain reaction (PCR), terminal transferase tailing, and end-filling of overhangs, for DNA molecules, and in vitro transcription driven, e.g., from phage promoters, such as T7, T3, and SP6, for RNA molecules. Commercial kits are readily available for each such labeling approach. Analogues can also be incorporated during automated solid phase chemical synthesis. Labels can also be incorporated after nucleic acid synthesis, with the 5′ phosphate and 3′ hydroxyl providing convenient sites for post-synthetic covalent attachment of detectable labels.

[0152] Other post-synthetic approaches also permit internal labeling of nucleic acids. For example, fluorophores can be attached using a cisplatin reagent that reacts with the N7 of guanine residues (and, to a lesser extent, adenine bases) in DNA, RNA, and Peptide Nucleic Acids (PNA) to provide a stable coordination complex between the nucleic acid and fluorophore label (Universal Linkage System) (available from Molecular Probes, Inc., Eugene, Oreg., USA and Amersham Pharmacia Biotech, Piscataway, N.J., USA); see Alers et al., Genes, Chromosomes & Cancer 25: 301-305 (1999); Jelsma et al., J. NIH Res. 5: 82 (1994); Van Belkum et al., BioTechniques 16: 148-153 (1994). Alternatively, nucleic acids can be labeled using a disulfide-containing linker (FastTag™ Reagent, Vector Laboratories, Inc., Burlingame, Calif., USA) that is photo- or thermally coupled to the target nucleic acid using aryl azide chemistry; after reduction, a free thiol is available for coupling to a hapten, fluorophore, sugar, affinity ligand, or other marker.

[0153] One or more independent or interacting labels can be incorporated into the nucleic acid molecules of the present invention. For example, both a fluorophore and a moiety that in proximity thereto acts to quench fluorescence can be included to report specific hybridization through release of fluorescence quenching or to report exonucleotidic excision. See, e.g., Tyagi et al., Nature Biotechnol. 14: 303-308 (1996); Tyagi et al., Nature Biotechnol. 16: 49-53 (1998); Sokol et al., Proc. Natl. Acad. Sci. USA 95: 11538-11543 (1998); Kostrikis et al., Science 279: 1228-1229 (1998); Marras et al., Genet. Anal. 14: 151-156 (1999); Holland et al., Proc. Natl. Acad. Sci. USA 88: 7276-7280 (1991); Heid et al., Genome Res. 6(10): 986-94 (1996); Kuimelis et al., Nucleic Acids Symp. Ser. (37): 255-6 (1997); and U.S. Pat. Nos. 5,846,726, 5,925,517, 5,925,517, 5,723,591 and 5,538,848, the disclosures of which are incorporated herein by reference in their entireties.

[0154] Nucleic acid molecules of the present invention may also be modified by altering one or more native phosphodiester internucleoside bonds to more nuclease-resistant, internucleoside bonds. See Hartmann et al. (eds.), Manual of Antisense Methodology: Perspectives in Antisense Science, Kluwer Law International (1999); Stein et al. (eds.), Applied Antisense Oligonucleotide Technology, Wiley-Liss (1998); Chadwick et al. (eds.), Oligonucleotides as Therapeutic Agents—Symposium No. 209, John Wiley & Son Ltd (1997). Such altered internucleoside bonds are often desired for techniques or for targeted gene correction, Gamper et al., Nucl. Acids Res. 28(21): 4332-4339 (2000). For double-stranded RNA inhibition which may utilize either natural ds RNA or ds RNA modified in its, sugar, phosphate or base, see Hannon, Nature 418(11): 244-251 (2002); Fire et al. in WO 99/32619; Tuschl et al. in US2002/0086356; Kruetzer et al in WO 00/44895, the disclosures of which are incorporated herein by reference in their entirety. For circular antisense, see Kool in U.S. Pat. No. 5,426,180, the disclosure of which is incorporated herein by reference in its entirety.

[0155] Modified oligonucleotide back-bones include, without limitation, phosphorothioates, chiral phosphorothioates, phosphorodithioates, phosphotriesters, aminoalkylphosphotriesters, methyl and other alkyl phosphonates including 3′-alkylene phosphonates and chiral phosphonates, phosphinates, phosphoramidates including 3′-amino phosphoramidate and aminoalkylphosphoramidates, thionophosphoramidates, thionoalkylphosphonates; thionoalkylphosphotriesters, and boranophosphates having normal 3′-5′ linkages, 2′-5′ linked analogs of these, and those having inverted polarity wherein the adjacent pairs of nucleoside units are linked 3′-5′ to 5′-3′ or 2′-5′ to 5′-2′. Representative U.S. Patents that teach the preparation of the above phosphorus-containing linkages include, but are not limited to, U.S. Pat. Nos. 3,687,808; 4,469,863; 4,476,301; 5,023,243; 5,177,196; 5,188,897; 5,264,423; 5,276,019; 5,278,302; 5,286,717; 5,321,131; 5,399,676; 5,405,939; 5,453,496; 5,455,233; 5,466,677; 5,476,925; 5,519,126; 5,536,821; 5,541,306; 5,550,111; 5,563,253; 5,571,799; 5,587,361; and 5,625,050, the disclosures of which are incorporated herein by reference in their entireties. In a preferred embodiment, the modified internucleoside linkages may be used for antisense techniques.

[0156] Other modified oligonucleotide backbones do not include a phosphorus atom, but have backbones that are formed by short chain alkyl or cycloalkyl internucleoside linkages, mixed heteroatom and alkyl or cycloalkyl internucleoside linkages, or one or more short chain heteroatomic or heterocyclic internucleoside linkages. These include those having morpholino linkages (formed in part from the sugar portion of a nucleoside); siloxane backbones; sulfide, sulfoxide and sulfone backbones; formacetyl and thioformacetyl backbones; methylene formacetyl and thioformacetyl backbones; alkene containing backbones; sulfamate backbones; methyleneimino and methylenehydrazino backbones; sulfonate and sulfonamide backbones; amide backbones; and others having mixed N, O, S and CH₂ component parts. Representative U.S. patents that teach the preparation of the above backbones include, but are not limited to, U.S. Pat. Nos. 5,034,506; 5,166,315; 5,185,444; 5,214,134; 5,216,141; 5,235,033; 5,264,562; 5,264,564; 5,405,938; 5,434,257; 5,466,677; 5,470,967; 5,489,677; 5,541,307; 5,561,225; 5,596,086; 5,602,240; 5,610,289; 5,602,240; 5,608,046; 5,610,289; 5,618,704; 5,623,070; 5,663,312; 5,633,360; 5,677,437 and 5,677,439; the disclosures of which are incorporated herein by reference in their entireties.

[0157] In other preferred nucleic acid molecules, both the sugar and the internucleoside linkage are replaced with novel groups, such as peptide nucleic acids (PNA). In PNA compounds, the phosphodiester backbone of the nucleic acid is replaced with an amide-containing backbone, in particular by repeating N-(2-aminoethyl) glycine units linked by amide bonds. Nucleobases are bound directly or indirectly to aza nitrogen atoms of the amide portion of the backbone, typically by methylene carbonyl linkages. PNA can be synthesized using a modified peptide synthesis protocol. PNA oligomers can be synthesized by both Fmoc and tBoc methods. Representative U.S. patents that teach the preparation of PNA compounds include, but are not limited to, U.S. Pat. Nos. 5,539,082; 5,714,331; and 5,719,262, each of which is herein incorporated by reference in its entirety. Automated PNA synthesis is readily achievable on commercial synthesizers (see, e.g., “PNA User's Guide,” Rev. 2, February 1998, Perseptive Biosystems Part No. 60138, Applied Biosystems, Inc., Foster City, Calif.). PNA molecules are advantageous for a number of reasons. First, because the PNA backbone is uncharged, PNA/DNA and PNA/RNA duplexes have a higher thermal stability than is found in DNA/DNA and DNA/RNA duplexes. The Tm of a PNA/DNA or PNA/RNA duplex is generally 1° C. higher per base pair than the Tm of the corresponding DNA/DNA or DNA/RNA duplex (in 100 mM NaCl). Second, PNA molecules can also form stable PNA/DNA complexes at low ionic strength, under conditions in which DNA/DNA duplex formation does not occur. Third, PNA also demonstrates greater specificity in binding to complementary DNA because a PNA/DNA mismatch is more destabilizing than DNA/DNA mismatch. A single mismatch in mixed a PNA/DNA 15-mer lowers the Tm by 8-20° C. (15° C. on average). In the corresponding DNA/DNA duplexes, a single mismatch lowers the Tm by 4-16° C. (11° C. on average). Because PNA probes can be significantly shorter than DNA probes, their specificity is greater. Fourth, PNA oligomers are resistant to degradation by enzymes, and the lifetime of these compounds is extended both in vivo and in vitro because nucleases and proteases do not recognize the PNA polyamide backbone with nucleobase sidechains. See, e.g., Ray et al., FASEB J. 14(9): 1041-60 (2000); Nielsen et al., Pharmacol Toxicol. 86(1): 3-7 (2000); Larsen et al., Biochim Biophys Acta. 1489(1): 159-66 (1999); Nielsen, Curr. Opin. Struct. Biol. 9(3): 353-7 (1999), and Nielsen, Curr. Opin. Biotechnol. 10(1): 71-5 (1999).

[0158] Nucleic acid molecules may be modified compared to their native structure throughout the length of the nucleic acid molecule or can be localized to discrete portions thereof. As an example of the latter, chimeric nucleic acids can be synthesized that have discrete DNA and RNA domains and that can be used for targeted gene repair and modified PCR reactions, as further described in, Misra et al., Biochem. 37: 1917-1925 (1998); and Finn et al., Nucl. Acids Res. 24: 3357-3363 (1996), and U.S. Pat. Nos. 5,760,012 and 5,731,181, the disclosures of which are incorporated herein by reference in their entireties.

[0159] Unless otherwise specified, nucleic acid molecules of the present invention can include any topological conformation appropriate to the desired use; the term thus explicitly comprehends, among others, single-stranded, double-stranded, triplexed, quadruplexed, partially double-stranded, partially-triplexed, partially-quadruplexed, branched, hairpinned, circular, and padlocked conformations. Padlocked conformations and their utilities are further described in Banér et al., Curr. Opin. Biotechnol. 12: 11-15 (2001); Escude et al., Proc. Natl. Acad. Sci. USA 14: 96(19):10603-7 (1999); and Nilsson et al., Science 265(5181): 2085-8 (1994). Triplexed and quadruplexed conformations, and their utilities, are reviewed in Praseuth et al., Biochim. Biophys. Acta. 1489(1): 181-206 (1999); Fox, Curr. Med. Chem. 7(1): 17-37 (2000); Kochetkova et al., Methods Mol. Biol. 130: 189-201 (2000); Chan et al., J. Mol. Med. 75(4): 267-82 (1997); Rowley et al., Mol Med 5(10): 693-700 (1999); Kool, Annu Rev Biophys Biomol Struct. 25: 1-28 (1996).

[0160] SNP Polymorphisms

[0161] Commonly, sequence differences between individuals involve differences in single nucleotide positions. SNPs may account for 90% of human DNA polymorphism. Collins et al., 8 Genome Res. 1229-31 (1998). SNPs include single base pair positions in genomic DNA at which different sequence alternatives (alleles) exist in a population. In addition, the least frequent allele generally must occur at a frequency of 1% or greater. DNA sequence variants with a reasonably high population frequency are observed approximately every 1,000 nucleotide across the genome, with estimates as high as 1 SNP per 350 base pairs. Wang et al., 280 Science 1077-82 (1998); Harding et al., 60 Am. J. Human Genet. 772-89 (1997); Taillon-Miller et al., 8 Genome Res. 748-54 (1998); Cargill et al., 22 Nat. Genet. 231-38 (1999); and Semple et al., 16 Bioinform. Disc. Note 735-38 (2000). The frequency of SNPs varies with the type and location of the change. In base substitutions, two-thirds of the substitutions involve the C-T and G-A type. This variation in frequency can be related to 5-methylcytosine deamination reactions that occur frequently, particularly at CpG dinucleotides. Regarding location, SNPs occur at a much higher frequency in non-coding regions than in coding regions. Information on over one million variable sequences is already publicly available via the Internet and more such markers are available from commercial providers of genetic information. Kwok and Gu, 5 Med. Today 538-53 (1999).

[0162] Several definitions of SNPs exist. See, e.g., Brooks, 235 Gene 177-86 (1999). As used herein, the term “single nucleotide polymorphism” or “SNP” includes all single base variants, thus including nucleotide insertions and deletions in addition to single nucleotide substitutions. There are two types of nucleotide substitutions. A transition is the replacement of one purine by another purine or one pyrimidine by another pyrimidine. A transversion is the replacement of a purine for a pyrimidine, or vice versa.

[0163] Numerous methods exist for detecting SNPs within a nucleotide sequence. A review of many of these methods can be found in Landegren et al., 8 Genome Res. 769-76 (1998). For example, a SNP in a genomic sample can be detected by preparing a Reduced Complexity Genome (RCG) from the genomic sample, then analyzing the RCG for the presence or absence of a SNP. See, e.g., WO 00/18960 which is herein incorporated by reference in its entirety. Multiple SNPs in a population of target polynucleotides in parallel can be detected using, for example, the methods of WO 00/50869 which is herein incorporated by reference in its entirety. Other SNP detection methods include the methods of U.S. Pat. Nos. 6,297,018 and 6,322,980 which are herein incorporated by reference in their entirety. Furthermore, SNPs can be detected by restriction fragment length polymorphism (RFLP) analysis. See, e.g., U.S. Pat. Nos. 5,324,631; 5,645,995 which are herein incorporated by reference in their entirety. RFLP analysis of SNPs, however, is limited to cases where the SNP either creates or destroys a restriction enzyme cleavage site. SNPs can also be detected by direct sequencing of the nucleotide sequence of interest. In addition, numerous assays based on hybridization have also been developed to detect SNPs and mismatch distinction by polymerases and ligases. Several web sites provide information about SNPs including Ensembl on the World Wide Web at ensemble.org, Sanger Institute on the World Wide Web at sanger.ac.uk/genetics/exon/, National Center for Biotechnology Information (NCBI) on the World Wide Web at ncbi.nlm.nih.gov/SNP/, The SNP Consortium Ltd. on the World Wide Web at snp.cshl.org. The chromosomal locations for the compositions disclosed herein are provided below. In addition, one of ordinary skill in the art could use a BLAST against the genome or any of the databases cited above to find the chromosomal location. Another a preferred method to find the genomic coordinates and associated SNPs would be to use the BLAT tool (genome.ucsc.edu, Kent et al. 2001, The Human Genome Browser at UCSC, Genome Research 996-1006 or Kent 2002 BLAT—The BLAST-Like Alignment Tool Genome Reseach, 1-9). All web sites above were accessed Dec. 3, 2003.

[0164] RNA Interference

[0165] RNA interference refers to the process of sequence-specific post transcriptional gene silencing in animals mediated by short interfering RNAs (siRNA). Fire et al., 1998, Nature, 391, 806. The corresponding process in plants is commonly referred to as post transcriptional gene silencing or RNA silencing and is also referred to as quelling in fungi. The process of post transcriptional gene silencing is thought to be an evolutionarily conserved cellular defense mechanism used to prevent the expression of foreign genes which is commonly shared by diverse flora and phyla. Fire et al., 1999, Trends Genet., 15, 358. Such protection from foreign gene expression may have evolved in response to the production of double-stranded RNAs (dsRNA) derived from viral infection or the random integration of transposon elements into a host genome via a cellular response that specifically destroys homologous single-stranded RNA or viral genomic RNA. The presence of dsRNA in cells triggers the RNAi response though a mechanism that has yet to be fully characterized. This mechanism appears to be different from the interferon response that results from dsRNA mediated activation of protein kinase PKR and 2′,5′-oligoadenylate synthetase resulting in non-specific cleavage of mRNA by ribonuclease L.

[0166] The presence of long dsRNAs in cells stimulates the activity of a ribonuclease III enzyme referred to as dicer. Dicer is involved in the processing of the dsRNA into short pieces of dsRNA known as short interfering RNAs (siRNA). Berstein et al., 2001, Nature, 409, 363. Short interfering RNAs derived from dicer activity are typically about 21-23 nucleotides in length and comprise about 19 base pair duplexes. Dicer has also been implicated in the excision of 21 and 22 nucleotide small temporal RNAs (stRNA) from precursor RNA of conserved structure that are implicated in translational control. Hutvagner et al., 2001, Science, 293, 834. The RNAi response also features an endonuclease complex containing a siRNA, commonly referred to as an RNA-induced silencing complex (RISC), which mediates cleavage of single-stranded RNA having sequence complementary to the antisense strand of the siRNA duplex. Cleavage of the target RNA takes place in the middle of the region complementary to the antisense strand of the siRNA duplex. Elbashir et al., 2001, Genes Dev., 15, 188.

[0167] Short interfering RNA mediated RNAi has been studied in a variety of systems. Fire et al., 1998, Nature, 391, 806, were the first to observe RNAi in C. Elegans. Wianny and Goetz, 1999, Nature Cell Biol., 2, 70, describe RNAi mediated by dsRNA in mouse embryos. Hammond et al., 2000, Nature, 404, 293, describe RNAi in Drosophila cells transfected with dsRNA. Elbashir et al., 2001, Nature, 411, 494, describe RNAi induced by introduction of duplexes of synthetic 21-nucleotide RNAs in cultured mammalian cells including human embryonic kidney and HeLa cells. Recent work in Drosophila embryonic lysates (Elbashir et al., 2001, EMBO J., 20, 6877) has revealed certain requirements for siRNA length, structure, chemical composition, and sequence that are essential to mediate efficient RNAi activity. These studies have shown that 21 nucleotide siRNA duplexes are most active when containing two nucleotide 3′-overhangs. Furthermore, complete substitution of one or both siRNA strands with 2′-deoxy (2′-H) or 2′-O-methyl nucleotides abolishes RNAi activity, whereas substitution of the 3′-terminal siRNA overhang nucleotides with deoxy nucleotides (2′-H) was shown to be tolerated. Single mismatch sequences in the center of the siRNA duplex were also shown to abolish RNAi activity. In addition, these studies also indicate that the position of the cleavage site in the target RNA is defined by the 5′-end of the siRNA guide sequence rather than the 3′-end. Elbashir et al., 2001, EMBO J., 20, 6877. Other studies have indicated that a 5′-phosphate on the target-complementary strand of a siRNA duplex is required for siRNA activity and that ATP is utilized to maintain the 5′-phosphate moiety on the siRNA. Nykanen et al., 2001, Cell, 107, 309.

[0168] Studies have shown that replacing the 3′-overhanging segments of a 21-mer siRNA duplex having 2 nucleotide 3′ overhangs with deoxyribonucleotides does not have an adverse effect on RNAi activity. Replacing up to 4 nucleotides on each end of the siRNA with deoxyribonucleotides has been reported to be well tolerated whereas complete substitution with deoxyribonucleotides results in no RNAi activity. Elbashir et al., 2001, EMBO J., 20, 6877. In addition, Elbashir et al., supra, also report that substitution of siRNA with 2′-O-methyl nucleotides completely abolishes RNAi activity. Li et al., WO 00/44914, and Beach et al., WO 01/68836 both suggest that siRNA “may include modifications to either the phosphate-sugar back bone or the nucleoside to include at least one of a nitrogen or sulfur heteroatom”, however neither application teaches to what extent these modifications are tolerated in siRNA molecules nor provides any examples of such modified siRNA. Kreutzer and Limmer, Canadian Patent Application No. 2,359,180, also describe certain chemical modifications for use in dsRNA constructs in order to counteract activation of double-stranded RNA-dependent protein kinase PKR, specifically 2′-amino or 2′-O-methyl nucleotides, and nucleotides containing a 2′-O or 4′-C methylene bridge. However, Kreutzer and Limmer similarly fail to show to what extent these modifications are tolerated in siRNA molecules nor do they provide any examples of such modified siRNA.

[0169] Parrish et al., 2000, Molecular Cell, 6, 1977-1087, tested certain chemical modifications targeting the unc-22 gene in C. elegans using long (>25 nt) siRNA transcripts. The authors describe the introduction of thiophosphate residues into these siRNA transcripts by incorporating thiophosphate nucleotide analogs with T7 and T3 RNA polymerase and observed that “RNAs with two [phosphorothioate] modified bases also had substantial decreases in effectiveness as RNAi triggers; [phosphorothioate] modification of more than two residues greatly destabilized the RNAs in vitro and we were not able to assay interference activities.” Parrish et al. at 1081. The authors also tested certain modifications at the 2′-position of the nucleotide sugar in the long siRNA transcripts and observed that substituting deoxynucleotides for ribonucleotides “produced a substantial decrease in interference activity”, especially in the case of Uridine to Thymidine and/or Cytidine to deoxy-Cytidine substitutions. Parrish et al. In addition, the authors tested certain base modifications, including substituting 4-thiouracil, 5-bromouracil, 5-iodouracil, 3-(aminoallyl)uracil for uracil, and inosine for guanosine in sense and antisense strands of the siRNA, and found that whereas 4-thiouracil and 5-bromouracil were all well tolerated, inosine “produced a substantial decrease in interference activity” when incorporated in either strand. Incorporation of 5-iodouracil and 3-(aminoallyl)uracil in the antisense strand resulted in substantial decrease in RNAi activity as well.

[0170] Beach et al., WO 01/68836, describes specific methods for attenuating gene expression using endogenously derived dsRNA. Tuschl et al., WO 01/75164, describes a Drosophila in vitro RNAi system and the use of specific siRNA molecules for certain functional genomic and certain therapeutic applications; although Tuschl, 2001, Chem. Biochem., 2, 239-245, doubts that RNAi can be used to cure genetic diseases or viral infection due “to the danger of activating interferon response”. Li et al., WO 00/44914, describes the use of specific dsRNAs for use in attenuating the expression of certain target genes. Zernicka-Goetz et al., WO 01/36646, describes certain methods for inhibiting the expression of particular genes in mammalian cells using certain dsRNA molecules. Fire et al., WO 99/32619, U.S. Pat. No. 6,506,559, the contents of which are hereby incorporated by reference in their entirety, describes particular methods for introducing certain dsRNA molecules into cells for use in inhibiting gene expression. Plaetinck et al., WO 00/01846, describes certain methods for identifying specific genes responsible for conferring a particular phenotype in a cell using specific dsRNA molecules. Mello et al., WO 01/29058, describes the identification of specific genes involved in dsRNA mediated RNAi. Deschamps Depaillette et al., International PCT Publication No. WO 99/07409, describes specific compositions consisting of particular dsRNA molecules combined with certain anti-viral agents. Driscoll et al., International PCT Publication No. WO 01/49844, describes specific DNA constructs for use in facilitating gene silencing in targeted organisms. Parrish et al., 2000, Molecular Cell, 6, 1977-1087, describes specific chemically modified siRNA constructs targeting the unc-22 gene of C. elegans. Tuschl et al., International PCT Publication No. WO 02/44321, describe certain synthetic siRNA constructs.

[0171] Methods for Using Nucleic Acid Molecules as Probes and Primers

[0172] The isolated nucleic acid molecules of the present invention can be used as hybridization probes to detect, characterize, and quantify hybridizing nucleic acids in, and isolate hybridizing nucleic acids from, both genomic and transcript-derived nucleic acid samples. When free in solution, such probes are typically, but not invariably, detectably labeled; bound to a substrate, as in a microarray, such probes are typically, but not invariably unlabeled.

[0173] In one embodiment, the isolated nucleic acid molecules of the present invention can be used as probes to detect and characterize gross alterations in the gene of a CSNA, such as deletions, insertions, translocations, and duplications of the CSNA genomic locus through fluorescence in situ hybridization (FISH) to chromosome spreads. See, e.g., Andreeff et al. (eds.), Introduction to Fluorescence In Situ Hybridization: Principles and Clinical Applications, John Wiley & Sons (1999). The isolated nucleic acid molecules of the present invention can be used as probes to assess smaller genomic alterations using, e.g., Southern blot detection of restriction fragment length polymorphisms. The isolated nucleic acid molecules of the present invention can be used as probes to isolate genomic clones that include a nucleic acid molecule of the present invention, which thereafter can be restriction mapped and sequenced to identify deletions, insertions, translocations, and substitutions (single nucleotide polymorphisms, SNPs) at the sequence level. Alternatively, detection techniques such as molecular beacons may be used, see Kostrikis et al. Science 279:1228-1229 (1998).

[0174] The isolated nucleic acid molecules of the present invention can also be used as probes to detect, characterize, and quantify CSNA in, and isolate CSNA from, transcript-derived nucleic acid samples. In one embodiment, the isolated nucleic acid molecules of the present invention can be used as hybridization probes to detect, characterize by length, and quantify mRNA by Northern blot of total or poly-A⁺-selected RNA samples. In another embodiment, the isolated nucleic acid molecules of the present invention can be used as hybridization probes to detect, characterize by location, and quantify mRNA by in situ hybridization to tissue sections. See, e.g., Schwarchzacher et al., In Situ Hybridization, Springer-Verlag New York (2000). In another preferred embodiment, the isolated nucleic acid molecules of the present invention can be used as hybridization probes to measure the representation of clones in a cDNA library or to isolate hybridizing nucleic acid molecules acids from cDNA libraries, permitting sequence level characterization of mRNAs that hybridize to CSNAs, including, without limitations, identification of deletions, insertions, substitutions, truncations, alternatively spliced forms and single nucleotide polymorphisms. In yet another preferred embodiment, the nucleic acid molecules of the instant invention may be used in microarrays.

[0175] All of the aforementioned probe techniques are well within the skill in the art, and are described at greater length in standard texts such as Sambrook (2001), supra; Ausubel (1999), supra; and Walker et al. (eds.), The Nucleic Acids Protocols Handbook, Humana Press (2000).

[0176] In another embodiment, a nucleic acid molecule of the invention may be used as a probe or primer to identify and/or amplify a second nucleic acid molecule that selectively hybridizes to the nucleic acid molecule of the invention. In this embodiment, it is preferred that the probe or primer be derived from a nucleic acid molecule encoding a CSP. More preferably, the probe or primer is derived from a nucleic acid molecule encoding a polypeptide having an amino acid sequence of SEQ ID NO: 96-237. Also preferred are probes or primers derived from a CSNA. More preferred are probes or primers derived from a nucleic acid molecule having a nucleotide sequence of SEQ ID NO: 1-95.

[0177] In general, a probe or primer is at least 10 nucleotides in length, more preferably at least 12, more preferably at least 14 and even more preferably at least 16 or 17 nucleotides in length. In an even more preferred embodiment, the probe or primer is at least 18 nucleotides in length, even more preferably at least 20 nucleotides and even more preferably at least 22 nucleotides in length. Primers and probes may also be longer in length. For instance, a probe or primer may be 25 nucleotides in length, or may be 30, 40 or 50 nucleotides in length. Methods of performing nucleic acid hybridization using oligonucleotide probes are well known in the art. See, e.g. Sambrook et al., 1989, supra, Chapter 11 and pp. 11.31-11.32 and 11.40-11.44, which describes radiolabeling of short probes, and pp. 11.45-11.53, which describe hybridization conditions for oligonucleotide probes, including specific conditions for probe hybridization (pp. 11.50-11.51).

[0178] Methods of performing primer-directed amplification are also well known in the art. Methods for performing the polymerase chain reaction (PCR) are compiled, inter alia, in McPherson, PCR Basics: From Background to Bench, Springer Verlag (2000); Innis et al. (eds.), PCR Applications: Protocols for Functional Genomics, Academic Press (1999); Gelfand et al. (eds.), PCR Strategies, Academic Press (1998); Newton et al., PCR, Springer-Verlag New York (1997); Burke (ed.), PCR: Essential Techniques, John Wiley & Son Ltd (1996); White (ed.), PCR Cloning Protocols: From Molecular Cloning to Genetic Engineering, Vol. 67, Humana Press (1996); and McPherson et al. (eds.), PCR 2: A Practical Approach, Oxford University Press, Inc. (1995). Methods for performing RT-PCR are collected, e.g., in Siebert et al. (eds.), Gene Cloning and Analysis by RT-PCR, Eaton Publishing Company/Bio Techniques Books Division, 1998; and Siebert (ed.), PCR Technique:RT-PCR, Eaton Publishing Company/BioTechniques Books (1995).

[0179] PCR and hybridization methods may be used to identify and/or isolate nucleic acid molecules of the present invention including allelic variants, homologous nucleic acid molecules and fragments. PCR and hybridization methods may also be used to identify, amplify and/or isolate nucleic acid molecules of the present invention that encode homologous proteins, analogs, fusion proteins or muteins of the invention. Nucleic acid primers as described herein can be used to prime amplification of nucleic acid molecules of the invention, using transcript-derived or genomic DNA as the template.

[0180] These nucleic acid primers can also be used, for example, to prime single base extension (SBE) for SNP detection (See, e.g., U.S. Pat. No. 6,004,744, the disclosure of which is incorporated herein by reference in its entirety).

[0181] Isothermal amplification approaches, such as rolling circle amplification, are also now well-described. See, e.g., Schweitzer et al., Curr. Opin. Biotechnol. 12(1): 21-7 (2001); International Patent publications WO 97/19193 and WO 00/15779, and U.S. Pat. Nos. 5,854,033 and 5,714,320, the disclosures of which are incorporated herein by reference in their entireties. Rolling circle amplification can be combined with other techniques to facilitate SNP detection. See, e.g., Lizardi et al., Nature Genet. 19(3): 225-32 (1998).

[0182] Nucleic acid molecules of the present invention may be bound to a substrate either covalently or noncovalently. The substrate can be porous or solid, planar or non-planar, unitary or distributed. The bound nucleic acid molecules may be used as hybridization probes, and may be labeled or unlabeled. In a preferred embodiment, the bound nucleic acid molecules are unlabeled.

[0183] In one embodiment, the nucleic acid molecule of the present invention is bound to a porous substrate, e.g., a membrane, typically comprising nitrocellulose, nylon, or positively charged derivatized nylon. The nucleic acid molecule of the present invention can be used to detect a hybridizing nucleic acid molecule that is present within a labeled nucleic acid sample, e.g., a sample of transcript-derived nucleic acids. In another embodiment, the nucleic acid molecule is bound to a solid substrate, including, without limitation, glass, amorphous silicon, crystalline silicon or plastics. Examples of plastics include, without limitation, polymethylacrylic, polyethylene, polypropylene, polyacrylate, polymethylmethacrylate, polyvinylchloride, polytetrafluoroethylene, polystyrene, polycarbonate, polyacetal, polysulfone, celluloseacetate, cellulosenitrate, nitrocellulose, or mixtures thereof. The solid substrate may be any shape, including rectangular, disk-like and spherical. In a preferred embodiment, the solid substrate is a microscope slide or slide-shaped substrate.

[0184] The nucleic acid molecule of the present invention can be attached covalently to a surface of the support substrate or applied to a derivatized surface in a chaotropic agent that facilitates denaturation and adherence by presumed noncovalent interactions, or some combination thereof. The nucleic acid molecule of the present invention can be bound to a substrate to which a plurality of other nucleic acids are concurrently bound, hybridization to each of the plurality of bound nucleic acids being separately detectable. At low density, e.g. on a porous membrane, these substrate-bound collections are typically denominated macroarrays; at higher density, typically on a solid support, such as glass, these substrate bound collections of plural nucleic acids are colloquially termed microarrays. As used herein, the term microarray includes arrays of all densities. It is, therefore, another aspect of the invention to provide microarrays that comprise one or more of the nucleic acid molecules of the present invention.

[0185] In yet another embodiment, the invention is directed to single exon probes based on the CSNAs disclosed herein.

[0186] Expression Vectors, Host Cells and Recombinant Methods of Producing Polypeptides

[0187] Another aspect of the present invention provides vectors that comprise one or more of the isolated nucleic acid molecules of the present invention, and host cells in which such vectors have been introduced.

[0188] The vectors can be used, inter alia, for propagating the nucleic acid molecules of the present invention in host cells (cloning vectors), for shuttling the nucleic acid molecules of the present invention between host cells derived from disparate organisms (shuttle vectors), for inserting the nucleic acid molecules of the present invention into host cell chromosomes (insertion vectors), for expressing sense or antisense RNA transcripts of the nucleic acid molecules of the present invention in vitro or within a host cell, and for expressing polypeptides encoded by the nucleic acid molecules of the present invention, alone or as fusion proteins with heterologous polypeptides (expression vectors). Vectors are by now well known in the art, and are described, inter alia, in Jones et al. (eds.), Vectors: Cloning Applications: Essential Techniques (Essential Techniques Series), John Wiley & Son Ltd. (1998); Jones et al. (eds.), Vectors: Expression Systems: Essential Techniques (Essential Techniques Series), John Wiley & Son Ltd. (1998); Gacesa et al., Vectors: Essential Data, John Wiley & Sons Ltd. (1995); Cid-Arregui (eds.), Viral Vectors: Basic Science and Gene Therapy, Eaton Publishing Co. (2000); Sambrook (2001), supra; Ausubel (1999), supra. Furthermore, a variety of vectors are available commercially. Use of existing vectors and modifications thereof are well within the skill in the art. Thus, only basic features need be described here.

[0189] Nucleic acid sequences may be expressed by operatively linking them to an expression control sequence in an appropriate expression vector and employing that expression vector to transform an appropriate unicellular host. Expression control sequences are sequences that control the transcription, post-transcriptional events and translation of nucleic acid sequences. Such operative linking of a nucleic acid sequence of this invention to an expression control sequence, of course, includes, if not already part of the nucleic acid sequence, the provision of a translation initiation codon, ATG or GTG, in the correct reading frame upstream of the nucleic acid sequence.

[0190] A wide variety of host/expression vector combinations may be employed in expressing the nucleic acid sequences of this invention. Useful expression vectors, for example, may consist of segments of chromosomal, non-chromosomal and synthetic nucleic acid sequences.

[0191] In one embodiment, prokaryotic cells may be used with an appropriate vector. Prokaryotic host cells are often used for cloning and expression. In a preferred embodiment, prokaryotic host cells include E. coli, Pseudomonas, Bacillus and Streptomyces. In a preferred embodiment, bacterial host cells are used to express the nucleic acid molecules of the instant invention. Useful expression vectors for bacterial hosts include bacterial plasmids, such as those from E. coli, Bacillus or Streptomyces, including pBluescript, pGEX-2T, pUC vectors, col E1, pCR1, pBR322, pMB9 and their derivatives, wider host range plasmids, such as RP4, phage DNAs, e.g., the numerous derivatives of phage lambda, e.g., NM989, λGT10 and λGT11, and other phages, e.g., M13 and filamentous single-stranded phage DNA. Where E. coli is used as host, selectable markers are, analogously, chosen for selectivity in gram negative bacteria: e.g., typical markers confer resistance to antibiotics, such as ampicillin, tetracycline, chloramphenicol, kanamycin, streptomycin and zeocin; auxotrophic markers can also be used.

[0192] In other embodiments, eukaryotic host cells, such as yeast, insect, mammalian or plant cells, may be used. Yeast cells, typically S. cerevisiae, are useful for eukaryotic genetic studies, due to the ease of targeting genetic changes by homologous recombination and the ability to easily complement genetic defects using recombinantly expressed proteins. Yeast cells are useful for identifying interacting protein components, e.g. through use of a two-hybrid system. In a preferred embodiment, yeast cells are useful for protein expression. Vectors of the present invention for use in yeast will typically, but not invariably, contain an origin of replication suitable for use in yeast and a selectable marker that is functional in yeast. Yeast vectors include Yeast Integrating plasmids (e.g., YIp5) and Yeast Replicating plasmids (the YRp and YEp series plasmids), Yeast Centromere plasmids (the YCp series plasmids), Yeast Artificial Chromosomes (YACs) which are based on yeast linear plasmids, denoted YLp, pGPD-2, 2μ plasmids and derivatives thereof, and improved shuttle vectors such as those described in Gietz et al., Gene, 74: 527-34 (1988) (YIplac, YEplac and YCplac). Selectable markers in yeast vectors include a variety of auxotrophic markers, the most common of which are (in Saccharomyces cerevisiae) URA3, HIS3, LEU2, TRP1 and LYS2, which complement specific auxotrophic mutations, such as ura3-52, his3-D1, leu2-D1, trp1-D1 and lys2-201.

[0193] Insect cells may be chosen for high efficiency protein expression. Where the host cells are from Spodoptera frugiperda, e.g., Sf9 and Sf21 cell lines, and expresSF™ cells (Protein Sciences Corp., Meriden, Conn., USA), the vector replicative strategy is typically based upon the baculovirus life cycle. Typically, baculovirus transfer vectors are used to replace the wild-type AcMNPV polyhedrin gene with a heterologous gene of interest. Sequences that flank the polyhedrin gene in the wild-type genome are positioned 5′ and 3′ of the expression cassette on the transfer vectors. Following co-transfection with AcMNPV DNA, a homologous recombination event occurs between these sequences resulting in a recombinant virus carrying the gene of interest and the polyhedrin or p10 promoter. Selection can be based upon visual screening for lacZ fusion activity.

[0194] The host cells may also be mammalian cells, which are particularly useful for expression of proteins intended as pharmaceutical agents, and for screening of potential agonists and antagonists of a protein or a physiological pathway. Mammalian vectors intended for autonomous extrachromosomal replication will typically include a viral origin, such as the SV40 origin (for replication in cell lines expressing the large T-antigen, such as COS1 and COS7 cells), the papillomavirus origin, or the EBV origin for long term episomal replication (for use, e.g., in 293-EBNA cells, which constitutively express the EBV EBNA-1 gene product and adenovirus E1A). Vectors intended for integration, and thus replication as part of the mammalian chromosome, can, but need not, include an origin of replication functional in mammalian cells, such as the SV40 origin. Vectors based upon viruses, such as adenovirus, adeno-associated virus, vaccinia virus, and various mammalian retroviruses, will typically replicate according to the viral replicative strategy. Selectable markers for use in mammalian cells include, but are not limited to, resistance to neomycin (G418), blasticidin, hygromycin and zeocin, and selection based upon the purine salvage pathway using HAT medium.

[0195] Expression in mammalian cells can be achieved using a variety of plasmids, including pSV2, pBC12BI, and p91023, as well as lytic virus vectors (e.g., vaccinia virus, adeno virus, and baculovirus), episomal virus vectors (e.g., bovine papillomavirus), and retroviral vectors (e.g., murine retroviruses). Useful vectors for insect cells include baculoviral vectors and pVL 941.

[0196] Plant cells can also be used for expression, with the vector replicon typically derived from a plant virus (e.g., cauliflower mosaic virus, CaMV; tobacco mosaic virus, TMV) and selectable markers chosen for suitability in plants.

[0197] It is known that codon usage of different host cells may be different. For example, a plant cell and a human cell may exhibit a difference in codon preference for encoding a particular amino acid. As a result, human mRNA may not be efficiently translated in a plant, bacteria or insect host cell. Therefore, another embodiment of this invention is directed to codon optimization. The codons of the nucleic acid molecules of the invention may be modified to resemble, as much as possible, genes naturally contained within the host cell without altering the amino acid sequence encoded by the nucleic acid molecule.

[0198] Any of a wide variety of expression control sequences may be used in these vectors to express the nucleic acid molecules of this invention. Such useful expression control sequences include the expression control sequences associated with structural genes of the foregoing expression vectors. Expression control sequences that control transcription include, e.g., promoters, enhancers and transcription termination sites. Expression control sequences in eukaryotic cells that control post-transcriptional events include splice donor and acceptor sites and sequences that modify the half-life of the transcribed RNA, e.g., sequences that direct poly(A) addition or binding sites for RNA-binding proteins. Expression control sequences that control translation include ribosome binding sites, sequences which direct targeted expression of the polypeptide to or within particular cellular compartments, and sequences in the 5′ and 3′ untranslated regions that modify the rate or efficiency of translation.

[0199] Examples of useful expression control sequences for a prokaryote, e.g., E. coli, will include a promoter, often a phage promoter, such as phage lambda pL promoter, the trc promoter, a hybrid derived from the trp and lac promoters, the bacteriophage T7 promoter (in E. coli cells engineered to express the T7 polymerase), the TAC or TRC system, the major operator and promoter regions of phage lambda, the control regions of fd coat protein, and the araBAD operon. Prokaryotic expression vectors may further include transcription terminators, such as the aspA terminator, and elements that facilitate translation, such as a consensus ribosome binding site and translation termination codon, Schomer et al., Proc. Natl. Acad. Sci. USA 83: 8506-8510 (1986).

[0200] Expression control sequences for yeast cells, typically S. cerevisiae, will include a yeast promoter, such as the CYC1 promoter, the GAL1 promoter, the GAL10 promoter, ADH1 promoter, the promoters of the yeast α-mating system, or the GPD promoter, and will typically have elements that facilitate transcription termination, such as the transcription termination signals from the CYC1 or ADH1 gene.

[0201] Expression vectors useful for expressing proteins in mammalian cells will include a promoter active in mammalian cells. These promoters include, but are not limited to, those derived from mammalian viruses, such as the enhancer-promoter sequences from the immediate early gene of the human cytomegalovirus (CMV), the enhancer-promoter sequences from the Rous sarcoma virus long terminal repeat (RSV LTR), the enhancer-promoter from SV40 and the early and late promoters of adenovirus. Other expression control sequences include the promoter for 3-phosphoglycerate kinase or other glycolytic enzymes, the promoters of acid phosphatase. Other expression control sequences include those from the gene comprising the CSNA of interest. Often, expression is enhanced by incorporation of polyadenylation sites, such as the late SV40 polyadenylation site and the polyadenylation signal and transcription termination sequences from the bovine growth hormone (BGH) gene, and ribosome binding sites. Furthermore, vectors can include introns, such as intron II of rabbit β-globin gene and the SV40 splice elements.

[0202] Preferred nucleic acid vectors also include a selectable or amplifiable marker gene and means for amplifying the copy number of the gene of interest. Such marker genes are well known in the art. Nucleic acid vectors may also comprise stabilizing sequences (e.g., ori- or ARS-like sequences and telomere-like sequences), or may alternatively be designed to favor directed or non-directed integration into the host cell genome. In a preferred embodiment, nucleic acid sequences of this invention are inserted in frame into an expression vector that allows a high level expression of an RNA which encodes a protein comprising the encoded nucleic acid sequence of interest. Nucleic acid cloning and sequencing methods are well known to those of skill in the art and are described in an assortment of laboratory manuals, including Sambrook (1989), supra, Sambrook (2000), supra; Ausubel (1992), supra; and Ausubel (1999), supra. Product information from manufacturers of biological, chemical and immunological reagents also provide useful information.

[0203] Expression vectors may be either constitutive or inducible. Inducible vectors include either naturally inducible promoters, such as the trc promoter, which is regulated by the lac operon, and the pL promoter, which is regulated by tryptophan, the MMTV-LTR promoter, which is inducible by dexamethasone, or can contain synthetic promoters and/or additional elements that confer inducible control on adjacent promoters. Examples of inducible synthetic promoters are the hybrid Plac/ara-1 promoter and the PLtetO-1 promoter. The PLtetO-1 promoter takes advantage of the high expression levels from the PL promoter of phage lambda, but replaces the lambda repressor sites with two copies of operator 2 of the Tn10 tetracycline resistance operon, causing this promoter to be tightly repressed by the Tet repressor protein and induced in response to tetracycline (Tc) and Tc derivatives such as anhydrotetracycline. Vectors may also be inducible because they contain hormone response elements, such as the glucocorticoid response element (GRE) and the estrogen response element (ERE), which can confer hormone inducibility where vectors are used for expression in cells having the respective hormone receptors. To reduce background levels of expression, elements responsive to ecdysone, an insect hormone, can be used instead, with coexpression of the ecdysone receptor.

[0204] In one embodiment of the invention, expression vectors can be designed to fuse the expressed polypeptide to small protein tags that facilitate purification and/or visualization. Such tags include a polyhistidine tag that facilitates purification of the fusion protein by immobilized metal affinity chromatography, for example using NiNTA resin (Qiagen Inc., Valencia, Calif., USA) or TALON™ resin (cobalt immobilized affinity chromatography medium, Clontech Labs, Palo Alto, Calif., USA). The fusion protein can include a chitin-binding tag and self-excising intein, permitting chitin-based purification with self-removal of the fused tag (IMPACT™ system, New England Biolabs, Inc., Beverley, Mass., USA). Alternatively, the fusion protein can include a calmodulin-binding peptide tag, permitting purification by calmodulin affinity resin (Stratagene, La Jolla, Calif., USA), or a specifically excisable fragment of the biotin carboxylase carrier protein, permitting purification of in vivo biotinylated protein using an avidin resin and subsequent tag removal (Promega, Madison, Wis., USA). As another useful alternative, the polypeptides of the present invention can be expressed as a fusion to glutathione-S-transferase, the affinity and specificity of binding to glutathione permitting purification using glutathione affinity resins, such as Glutathione-Superflow Resin (Clontech Laboratories, Palo Alto, Calif., USA), with subsequent elution with free glutathione. Other tags include, for example, the Xpress epitope, detectable by anti-Xpress antibody (Invitrogen, Carlsbad, Calif., USA), a myc tag, detectable by anti-myc tag antibody, the V5 epitope, detectable by anti-V5 antibody (Invitrogen, Carlsbad, Calif., USA), FLAG® epitope, detectable by anti-FLAG® antibody (Stratagene, La Jolla, Calif., USA), and the HA epitope, detectable by anti-HA antibody.

[0205] For secretion of expressed polypeptides, vectors can include appropriate sequences that encode secretion signals, such as leader peptides. For example, the pSecTag2 vectors (Invitrogen, Carlsbad, Calif., USA) are 5.2 kb mammalian expression vectors that carry the secretion signal from the V-J2-C region of the mouse Ig kappa-chain for efficient secretion of recombinant proteins from a variety of mammalian cell lines.

[0206] Expression vectors can also be designed to fuse proteins encoded by the heterologous nucleic acid insert to polypeptides that are larger than purification and/or identification tags. Useful protein fusions include those that permit display of the encoded protein on the surface of a phage or cell, fusions to intrinsically fluorescent proteins, such as those that have a green fluorescent protein (GFP)-like chromophore, fusions to the IgG Fc region, and fusions for use in two hybrid systems.

[0207] Vectors for phage display fuse the encoded polypeptide to, e.g., the gene III protein (pIII) or gene VIII protein (pVIII) for display on the surface of filamentous phage, such as M13. See Barbas et al., Phage Display: A Laboratory Manual, Cold Spring Harbor Laboratory Press (2001); Kay et al. (eds.), Phage Display of Peptides and Proteins: A Laboratory Manual, Academic Press, Inc., (1996); Abelson et al. (eds.), Combinatorial Chemistry (Methods in Enzymology, Vol. 267) Academic Press (1996). Vectors for yeast display, e.g. the pYD1 yeast display vector (Invitrogen, Carlsbad, Calif., USA), use the α-agglutinin yeast adhesion receptor to display recombinant protein on the surface of S. cerevisiae. Vectors for mammalian display, e.g., the pDisplay™ vector (Invitrogen, Carlsbad, Calif., USA), target recombinant proteins using an N-terminal cell surface targeting signal and a C-terminal transmembrane anchoring domain of platelet derived growth factor receptor.

[0208] A wide variety of vectors now exist that fuse proteins encoded by heterologous nucleic acids to the chromophore of the substrate-independent, intrinsically fluorescent green fluorescent protein from Aequorea victoria (“GFP”) and its variants. The GFP-like chromophore can be selected from GFP-like chromophores found in naturally occurring proteins, such as A. victoria GFP (GenBank accession number AAA27721), Renilla reniformis GFP, FP583 (GenBank accession no. AF168419) (DsRed), FP593 (AF272711), FP483 (AF168420), FP484 (AF168424), FP595 (AF246709), FP486 (AF168421), FP538 (AF168423), and FP506 (AF168422), and need include only so much of the native protein as is needed to retain the chromophore's intrinsic fluorescence. Methods for determining the minimal domain required for fluorescence are known in the art. See Li et al., J. Biol. Chem. 272: 28545-28549 (1997). Alternatively, the GFP-like chromophore can be selected from GFP-like chromophores modified from those found in nature. The methods for engineering such modified GFP-like chromophores and testing them for fluorescence activity, both alone and as part of protein fusions, are well known in the art. See Heim et al., Curr. Biol. 6: 178-182 (1996) and Palm et al., Methods Enzymol. 302: 378-394 (1999). A variety of such modified chromophores are now commercially available and can readily be used in the fusion proteins of the present invention. These include EGFP (“enhanced GFP”), EBFP (“enhanced blue fluorescent protein”), BFP2, EYFP (“enhanced yellow fluorescent protein”), ECFP (“enhanced cyan fluorescent protein”) or Citrine. EGFP (see, e.g, Cormack et al., Gene 173: 33-38 (1996); U.S. Pat. Nos. 6,090,919 and 5,804,387, the disclosures of which are incorporated herein by reference in their entireties) is found on a variety of vectors, both plasmid and viral, which are available commercially (Clontech Labs, Palo Alto, Calif., USA); EBFP is optimized for expression in mammalian cells whereas BFP2, which retains the original jellyfish codons, can be expressed in bacteria (see, e.g,. Heim et al., Curr. Biol. 6: 178-182 (1996) and Cormack et al., Gene 173: 33-38 (1996)). Vectors containing these blue-shifted variants are available from Clontech Labs (Palo Alto, Calif., USA). Vectors containing EYFP, ECFP (see, e.g., Heim et al., Curr. Biol. 6: 178-182 (1996); Miyawaki et al., Nature 388: 882-887 (1997)) and Citrine (see, e.g., Heikal et al., Proc. Natl. Acad. Sci. USA 97: 11996-12001 (2000)) are also available from Clontech Labs. The GFP-like chromophore can also be drawn from other modified GFPs, including those described in U.S. Pat. Nos. 6,124,128; 6,096,865; 6,090,919; 6,066,476; 6,054,321; 6,027,881; 5,968,750; 5,874,304; 5,804,387; 5,777,079; 5,741,668; and 5,625,048, the disclosures of which are incorporated herein by reference in their entireties. See also Conn (ed.), Green Fluorescent Protein (Methods in Enzymology, Vol. 302), Academic Press, Inc. (1999); Yang, et al., J Biol Chem, 273: 8212-6 (1998); Bevis et al., Nature Biotechnology, 20:83-7 (2002). The GFP-like chromophore of each of these GFP variants can usefully be included in the fusion proteins of the present invention.

[0209] Fusions to the IgG Fc region increase serum half-life of protein pharmaceutical products through interaction with the FcRn receptor (also denominated the FcRp receptor and the Brambell receptor, FcRb), further described in International Patent Application Nos. WO 97/43316, WO 97/34631, WO 96/32478, and WO 96/18412, the disclosures of which are incorporated herein by reference in their entireties.

[0210] For long-term, high-yield recombinant production of the polypeptides of the present invention, stable expression is preferred. Stable expression is readily achieved by integration into the host cell genome of vectors having selectable markers, followed by selection of these integrants. Vectors such as pUB6/V5-His A, B, and C (Invitrogen, Carlsbad, Calif., USA) are designed for high-level stable expression of heterologous proteins in a wide range of mammalian tissue types and cell lines. pUB6/V5-His uses the promoter/enhancer sequence from the human ubiquitin C gene to drive expression of recombinant proteins: expression levels in 293, CHO, and NIH3T3 cells are comparable to levels from the CMV and human EF-1a promoters. The bsd gene permits rapid selection of stably transfected mammalian cells with the potent antibiotic blasticidin.

[0211] Replication incompetent retroviral vectors, typically derived from Moloney murine leukemia virus, also are useful for creating stable transfectants having integrated provirus. The highly efficient transduction machinery of retroviruses, coupled with the availability of a variety of packaging cell lines such as RetroPack™ PT 67, EcoPack2™-293, AmphoPack-293, and GP2-293 cell lines (all available from Clontech Laboratories, Palo Alto, Calif., USA) allow a wide host range to be infected with high efficiency; varying the multiplicity of infection readily adjusts the copy number of the integrated provirus.

[0212] Of course, not all vectors and expression control sequences will function equally well to express the nucleic acid molecules of this invention. Neither will all hosts function equally well with the same expression system. However, one of skill in the art may make a selection among these vectors, expression control sequences and hosts without undue experimentation and without departing from the scope of this invention. For example, in selecting a vector, the host must be considered because the vector must be replicated in it. The vector's copy number, the ability to control that copy number, the ability to control integration, if any, and the expression of any other proteins encoded by the vector, such as an antibiotic or other selection marker, should also be considered. The present invention further includes host cells comprising the vectors of the present invention, either present episomally within the cell or integrated, in whole or in part, into the host cell chromosome. Among other considerations, some of which are described above, a host cell strain may be chosen for its ability to process the expressed polypeptide in the desired fashion. Such post-translational modifications of the polypeptide include, but are not limited to, acetylation, carboxylation, glycosylation, phosphorylation, lipidation, and acylation, and it is an aspect of the present invention to provide CSPs with such post-translational modifications.

[0213] In selecting an expression control sequence, a variety of factors should also be considered. These include, for example, the relative strength of the sequence, its controllability, and its compatibility with the nucleic acid molecules of this invention, particularly with regard to potential secondary structures. Unicellular hosts should be selected by consideration of their compatibility with the chosen vector, the toxicity of the product coded for by the nucleic acid sequences of this invention, their secretion characteristics, their ability to fold the polypeptide correctly, their fermentation or culture requirements, and the ease of purification from them of the products coded for by the nucleic acid molecules of this invention.

[0214] The recombinant nucleic acid molecules and more particularly, the expression vectors of this invention may be used to express the polypeptides of this invention as recombinant polypeptides in a heterologous host cell. The polypeptides of this invention may be full-length or less than full-length polypeptide fragments recombinantly expressed from the nucleic acid molecules according to this invention. Such polypeptides include analogs, derivatives and muteins that may or may not have biological activity.

[0215] Vectors of the present invention will also often include elements that permit in vitro transcription of RNA from the inserted heterologous nucleic acid. Such vectors typically include a phage promoter, such as that from T7, T3, or SP6, flanking the nucleic acid insert. Often two different such promoters flank the inserted nucleic acid, permitting separate in vitro production of both sense and antisense strands.

[0216] Transformation and other methods of introducing nucleic acids into a host cell (e.g., conjugation, protoplast transformation or fusion, transfection, electroporation, liposome-delivery, membrane fusion techniques, high velocity DNA-coated pellets, viral infection and protoplast fusion) can be accomplished by a variety of methods which are well known in the art (See, for instance, Ausubel, supra, and Sambrook et al., supra). Bacterial, yeast, plant or mammalian cells are transformed or transfected with an expression vector, such as a plasmid, a cosmid, or the like, wherein the expression vector comprises the nucleic acid of interest. Alternatively, the cells may be infected by a viral expression vector comprising the nucleic acid of interest. Depending upon the host cell, vector, and method of transformation used, transient or stable expression of the polypeptide will be constitutive or inducible. One having ordinary skill in the art will be able to decide whether to express a polypeptide transiently or stably, and whether to express the protein constitutively or inducibly.

[0217] A wide variety of unicellular host cells are useful in expressing the DNA sequences of this invention. These hosts may include well known eukaryotic and prokaryotic hosts, such as strains of, fungi, yeast, insect cells such as Spodoptera frugiperda (SF9), animal cells such as CHO, as well as plant cells in tissue culture. Representative examples of appropriate host cells include, but are not limited to, bacterial cells, such as E. coli, Caulobacter crescentus, Streptomyces species, and Salmonella typhimurium; yeast cells, such as Saccharomyces cerevisiae, Schizosaccharomyces pombe, Pichia pastoris, Pichia methanolica; insect cell lines, such as those from Spodoptera frugiperda, e.g., Sf9 and Sf21 cell lines, and expresSF™ cells (Protein Sciences Corp., Meriden, Conn., USA), Drosophila S2 cells, and Trichoplusia ni High Five® Cells (Invitrogen, Carlsbad, Calif., USA); and mammalian cells. Typical mammalian cells include BHK cells, BSC 1 cells, BSC 40 cells, BMT 10 cells, VERO cells, COS1 cells, COS7 cells, Chinese hamster ovary (CHO) cells, 3T3 cells, NIH 3T3 cells, 293 cells, HEPG2 cells, HeLa cells, L cells, MDCK cells, HEK293 cells, WI38 cells, murine ES cell lines (e.g., from strains 129/SV, C57/BL6, DBA-1, 129/SVJ), K562 cells, Jurkat cells, and BW5147 cells. Other mammalian cell lines are well known and readily available from the American Type Culture Collection (ATCC) (Manassas, Va., USA) and the National Institute of General Medical Sciences (NIGMS) Human Genetic Cell Repository at the Coriell Cell Repositories (Camden, N.J., USA). Cells or cell lines derived from colon are particularly preferred because they may provide a more native post-translational processing. Particularly preferred are human colon cells.

[0218] Particular details of the transfection, expression and purification of recombinant proteins are well documented and are understood by those of skill in the art. Further details on the various technical aspects of each of the steps used in recombinant production of foreign genes in bacterial cell expression systems can be found in a number of texts and laboratory manuals in the art. See, e.g., Ausubel (1992), supra, Ausubel (1999), supra, Sambrook (1989), supra, and Sambrook (2001), supra.

[0219] Methods for introducing the vectors and nucleic acid molecules of the present invention into the host cells are well known in the art; the choice of technique will depend primarily upon the specific vector to be introduced and the host cell chosen.

[0220] Nucleic acid molecules and vectors may be introduced into prokaryotes, such as E. coli in a number of ways. For instance, phage lambda vectors will typically be packaged using a packaging extract (e.g., Gigapack® packaging extract, Stratagene, La Jolla, Calif., USA), and the packaged virus used to infect E. coli.

[0221] Plasmid vectors will typically be introduced into chemically competent or electrocompetent bacterial cells. E. coli cells can be rendered chemically competent by treatment, e.g., with CaCl₂, or a solution of Mg²⁺, Mn²⁺, Ca²⁺, Rb⁺ or K⁺, dimethyl sulfoxide, dithiothreitol, and hexamine cobalt (III), Hanahan, J. Mol. Biol. 166(4):557-80 (1983), and vectors introduced by heat shock. A wide variety of chemically competent strains are also available commercially (e.g., Epicurian Coli® XL10-Gold® Ultracompetent Cells (Stratagene, La Jolla, Calif., USA); DH5α competent cells (Clontech Laboratories, Palo Alto, Calif., USA); and TOP10 Chemically Competent E. coli Kit (Invitrogen, Carlsbad, Calif., USA)). Bacterial cells can be rendered electrocompetent to take up exogenous DNA by electroporation by various pre-pulse treatments; vectors are introduced by electroporation followed by subsequent outgrowth in selected media. An extensive series of protocols is provided by BioRad (Richmond, Calif., USA).

[0222] Vectors can be introduced into yeast cells by spheroplasting, treatment with lithium salts, electroporation, or protoplast fusion. Spheroplasts are prepared by the action of hydrolytic enzymes such as a snail-gut extract, usually denoted Glusulase or Zymolyase, or an enzyme from Arthrobacter luteus to remove portions of the cell wall in the presence of osmotic stabilizers, typically 1 M sorbitol. DNA is added to the spheroplasts, and the mixture is co-precipitated with a solution of polyethylene glycol (PEG) and Ca²⁺. Subsequently, the cells are resuspended in a solution of sorbitol, mixed with molten agar and then layered on the surface of a selective plate containing sorbitol.

[0223] For lithium-mediated transformation, yeast cells are treated with lithium acetate to permeabilize the cell wall, DNA is added and the cells are co-precipitated with PEG. The cells are exposed to a brief heat shock, washed free of PEG and lithium acetate, and subsequently spread on plates containing ordinary selective medium. Increased frequencies of transformation are obtained by using specially-prepared single-stranded carrier DNA and certain organic solvents. Schiest1 et al., Curr. Genet. 16(5-6): 339-46 (1989).

[0224] For electroporation, freshly-grown yeast cultures are typically washed, suspended in an osmotic protectant, such as sorbitol, mixed with DNA, and the cell suspension pulsed in an electroporation device. Subsequently, the cells are spread on the surface of plates containing selective media. Becker et al., Methods Enzymol. 194: 182-187 (1991). The efficiency of transformation by electroporation can be increased over 100-fold by using PEG, single-stranded carrier DNA and cells that are in late log-phase of growth. Larger constructs, such as YACs, can be introduced by protoplast fusion.

[0225] Mammalian and insect cells can be directly infected by packaged viral vectors, or transfected by chemical or electrical means. For chemical transfection, DNA can be coprecipitated with CaPO₄ or introduced using liposomal and nonliposomal lipid-based agents. Commercial kits are available for CaPO₄ transfection (CalPhos™ Mammalian Transfection Kit, Clontech Laboratories, Palo Alto, Calif., USA), and lipid-mediated transfection can be practiced using commercial reagents, such as LIPOFECTAMINE™ 2000, LIPOFECTAMINE™ Reagent, CELLFECTIN® Reagent, and LIPOFECTIN® Reagent (Invitrogen, Carlsbad, Calif., USA), DOTAP Liposomal Transfection Reagent, FuGENE 6, X-tremeGENE Q2, DOSPER, (Roche Molecular Biochemicals, Indianapolis, Ind. USA), Effectene™, PolyFect®, Superfect® (Qiagen, Inc., Valencia, Calif., USA). Protocols for electroporating mammalian cells can be found in, for example, Norton et al. (eds.), Gene Transfer Methods: Introducing DNA into Living Cells and Organisms, BioTechniques Books, Eaton Publishing Co. (2000). Other transfection techniques include transfection by particle bombardment and microinjection. See, e.g., Cheng et al., Proc. Natl. Acad. Sci. USA 90(10): 4455-9 (1993); Yang et al., Proc. Natl. Acad. Sci. USA 87(24): 9568-72 (1990).

[0226] Production of the recombinantly produced proteins of the present invention can optionally be followed by purification.

[0227] Purification of recombinantly expressed proteins is now well within the skill in the art and thus need not be detailed here. See, e.g., Thorner et al. (eds.), Applications of Chimeric Genes and Hybrid Proteins, Part A: Gene Expression and Protein Purification (Methods in Enzymology, Vol. 326), Academic Press (2000); Harbin (ed.), Cloning, Gene Expression and Protein Purification: Experimental Procedures and Process Rationale, Oxford Univ. Press (2001); Marshak et al., Strategies for Protein Purification and Characterization: A Laboratory Course Manual, Cold Spring Harbor Laboratory Press (1996); and Roe (ed.), Protein Purification Applications, Oxford University Press (2001).

[0228] Briefly, however, if purification tags have been fused through use of an expression vector that appends such tags, purification can be effected, at least in part, by means appropriate to the tag, such as use of immobilized metal affinity chromatography for polyhistidine tags. Other techniques common in the art include ammonium sulfate fractionation, immunoprecipitation, fast protein liquid chromatography (FPLC), high performance liquid chromatography (HPLC), and preparative gel electrophoresis.

Polypeptides, including Fragments Muteins, Homologous Proteins, Allelic Variants, Analogs and Derivatives

[0229] Another aspect of the invention relates to polypeptides encoded by the nucleic acid molecules described herein. In a preferred embodiment, the polypeptide is a colon specific polypeptide (CSP). In an even more preferred embodiment, the polypeptide comprises an amino acid sequence of SEQ ID NO:96-237 or is derived from a polypeptide having the amino acid sequence of SEQ ID NO: 96-237. A polypeptide as defined herein may be produced recombinantly, as discussed supra, may be isolated from a cell that naturally expresses the protein, or may be chemically synthesized following the teachings of the specification and using methods well known to those having ordinary skill in the art.

[0230] Polypeptides of the present invention may also comprise a part or fragment of a CSP. In a preferred embodiment, the fragment is derived from a polypeptide having an amino acid sequence selected from the group consisting of SEQ ID NO: 96-237. Polypeptides of the present invention comprising a part or fragment of an entire CSP may or may not be CSPs. For example, a full-length polypeptide may be colon-specific, while a fragment thereof may be found in other tissues as well as in colon. A polypeptide that is not a CSP, whether it is a fragment, analog, mutein, homologous protein or derivative, is nevertheless useful, especially for immunizing animals to prepare anti-CSP antibodies. In a preferred embodiment, the part or fragment is a CSP. Methods of determining whether a polypeptide of the present invention is a CSP are described infra.

[0231] Polypeptides of the present invention comprising fragments of at least 6 contiguous amino acids are also useful in mapping B cell and T cell epitopes of the reference protein. See, e.g., Geysen et al., Proc. Natl. Acad. Sci. USA 81: 3998-4002 (1984) and U.S. Pat. Nos. 4,708,871 and 5,595,915, the disclosures of which are incorporated herein by reference in their entireties. Because the fragment need not itself be immunogenic, part of an immunodominant epitope, nor even recognized by native antibody, to be useful in such epitope mapping, all fragments of at least 6 amino acids of a polypeptide of the present invention have utility in such a study.

[0232] Polypeptides of the present invention comprising fragments of at least 8 contiguous amino acids, often at least 15 contiguous amino acids, are useful as immunogens for raising antibodies that recognize polypeptides of the present invention. See, e.g., Lerner, Nature 299: 592-596 (1982); Shinnick et al., Annu. Rev. Microbiol. 37: 425-46 (1983); Sutcliffe et al., Science 219: 660-6 (1983). As further described in the above-cited references, virtually all 8-mers, conjugated to a carrier, such as a protein, prove immunogenic and are capable of eliciting antibody for the conjugated peptide; accordingly, all fragments of at least 8 amino acids of the polypeptides of the present invention have utility as immunogens.

[0233] Polypeptides comprising fragments of at least 8, 9, 10 or 12 contiguous amino acids are also useful as competitive inhibitors of binding of the entire polypeptide, or a portion thereof, to antibodies (as in epitope mapping), and to natural binding partners, such as subunits in a multimeric complex or to receptors or ligands of the subject protein; this competitive inhibition permits identification and separation of molecules that bind specifically to the polypeptide of interest. See U.S. Pat. Nos. 5,539,084 and 5,783,674, incorporated herein by reference in their entireties.

[0234] The polypeptide of the present invention thus preferably is at least 6 amino acids in length, typically at least 8, 9, 10 or 12 amino acids in length, and often at least 15 amino acids in length. Often, the polypeptide of the present invention is at least 20 amino acids in length, even 25 amino acids, 30 amino acids, 35 amino acids, or 50 amino acids or more in length. Of course, larger polypeptides having at least 75 amino acids, 100 amino acids, or even 150 amino acids are also useful, and at times preferred.

[0235] One having ordinary skill in the art can produce fragments by truncating the nucleic acid molecule, e.g., a CSNA, encoding the polypeptide and then expressing it recombinantly. Alternatively, one can produce a fragment by chemically synthesizing a portion of the full-length polypeptide. One may also produce a fragment by enzymatically cleaving either a recombinant polypeptide or an isolated naturally occurring polypeptide. Methods of producing polypeptide fragments are well known in the art. See, e.g., Sambrook (1989), supra; Sambrook (2001), supra; Ausubel (1992), supra; and Ausubel (1999), supra. In one embodiment, a polypeptide comprising only a fragment, preferably a fragment of a CSP, may be produced by chemical or enzymatic cleavage of a CSP polypeptide. In a preferred embodiment, a polypeptide fragment is produced by expressing a nucleic acid molecule of the present invention encoding a fragment, preferably of a CSP, in a host cell.

[0236] Polypeptides of the present invention are also inclusive of mutants, fusion proteins, homologous proteins and allelic variants.

[0237] A mutant protein, or mutein, may have the same or different properties compared to a naturally occurring polypeptide and comprises at least one amino acid insertion, duplication, deletion, rearrangement or substitution compared to the amino acid sequence of a native polypeptide. Small deletions and insertions can often be found that do not alter the function of a protein. Muteins may or may not be colon-specific. Preferably, the mutein is colon-specific. More preferably the mutein is a polypeptide that comprises at least one amino acid insertion, duplication, deletion, rearrangement or substitution compared to the amino acid sequence of SEQ ID NO: 96-237. Accordingly, in a preferred embodiment, the mutein is one that exhibits at least 50% sequence identity, more preferably at least 60% sequence identity, even more preferably at least 70%, yet more preferably at least 80% sequence identity to a CSP comprising an amino acid sequence of SEQ ID NO: 96-237. In a yet more preferred embodiment, the mutein exhibits at least 85%, more preferably 90%, even more preferably 95% or 96%, and yet more preferably at least 97%, 98%, 99% or 99.5% sequence identity to a CSP comprising an amino acid sequence of SEQ ID NO: 96-237.

[0238] A mutein may be produced by isolation from a naturally occurring mutant cell, tissue or organism. A mutein may be produced by isolation from a cell, tissue or organism that has been experimentally mutagenized. Alternatively, a mutein may be produced by chemical manipulation of a polypeptide, such as by altering the amino acid residue to another amino acid residue using synthetic or semi-synthetic chemical techniques. In a preferred embodiment, a mutein is produced from a host cell comprising a mutated nucleic acid molecule compared to the naturally occurring nucleic acid molecule. For instance, one may produce a mutein of a polypeptide by introducing one or more mutations into a nucleic acid molecule of the invention and then expressing it recombinantly. These mutations may be targeted, in which particular encoded amino acids are altered, or may be untargeted, in which random encoded amino acids within the polypeptide are altered. Muteins with random amino acid alterations can be screened for a particular biological activity or property, particularly whether the polypeptide is colon-specific, as described below. Multiple random mutations can be introduced into the gene by methods well known to the art, e.g., by error-prone PCR, shuffling, oligonucleotide-directed mutagenesis, assembly PCR, sexual PCR mutagenesis, in vivo mutagenesis, cassette mutagenesis, recursive ensemble mutagenesis, exponential ensemble mutagenesis and site-specific mutagenesis. Methods of producing muteins with targeted or random amino acid alterations are well known in the art. See, e.g., Sambrook (1989), supra; Sambrook (2001), supra; Ausubel (1992), supra; and Ausubel (1999), as well as U.S. Pat. No. 5,223,408, which is herein incorporated by reference in its entirety.

[0239] The invention also contemplates polypeptides that are homologous to a polypeptide of the invention. In a preferred embodiment, the polypeptide is homologous to a CSP. In an even more preferred embodiment, the polypeptide is homologous to a CSP selected from the group having an amino acid sequence of SEQ ID NO: 96-237. By homologous polypeptide it is meant one that exhibits significant sequence identity to a CSP, preferably a CSP having an amino acid sequence of SEQ ID NO: 96-237. By significant sequence identity it is meant that the homologous polypeptide exhibits at least 50% sequence identity, more preferably at least 60% sequence identity, even more preferably at least 70%, yet more preferably at least 80% sequence identity to a CSP comprising an amino acid sequence of SEQ ID NO: 96-237. More preferred are homologous polypeptides exhibiting at least 85%, more preferably 90%, even more preferably 95% or 96%, and yet more preferably at least 97% or 98% sequence identity to a CSP comprising an amino acid sequence of SEQ ID NO: 96-237. Most preferably, the homologous polypeptide exhibits at least 99%, more preferably 99.5%, even more preferably 99.6%, 99.7%, 99.8% or 99.9% sequence identity to a CSP comprising an amino acid sequence of SEQ ID NO: 96-237. In a preferred embodiment, the amino acid substitutions of the homologous polypeptide are conservative amino acid substitutions as discussed supra.

[0240] Homologous polypeptides of the present invention also comprise polypeptide encoded by a nucleic acid molecule that selectively hybridizes to a CSNA or an antisense sequence thereof. In this embodiment, it is preferred that the homologous polypeptide be encoded by a nucleic acid molecule that hybridizes to a CSNA under low stringency, moderate stringency or high stringency conditions, as defined herein. More preferred is a homologous polypeptide encoded by a nucleic acid sequence which hybridizes to a CSNA selected from the group consisting of SEQ ID NO: 1-95 or a homologous polypeptide encoded by a nucleic acid molecule that hybridizes to a nucleic acid molecule that encodes a CSP, preferably a CSP of SEQ ID NO:96-237 under low stringency, moderate stringency or high stringency conditions, as defined herein.

[0241] Homologous polypeptides of the present invention may be naturally occurring and derived from another species, especially one derived from another primate, such as chimpanzee, gorilla, rhesus macaque, or baboon, wherein the homologous polypeptide comprises an amino acid sequence that exhibits significant sequence identity to that of SEQ ID NO: 96-237. The homologous polypeptide may also be a naturally occurring polypeptide from a human, when the CSP is a member of a family of polypeptides. The homologous polypeptide may also be a naturally occurring polypeptide derived from a non-primate, mammalian species, including without limitation, domesticated species, e.g., dog, cat, mouse, rat, rabbit, guinea pig, hamster, cow, horse, goat or pig. The homologous polypeptide may also be a naturally occurring polypeptide derived from a non-mammalian species, such as birds or reptiles. The naturally occurring homologous protein may be isolated directly from humans or other species. Alternatively, the nucleic acid molecule encoding the naturally occurring homologous polypeptide may be isolated and used to express the homologous polypeptide recombinantly. The homologous polypeptide may also be one that is experimentally produced by random mutation of a nucleic acid molecule and subsequent expression of the nucleic acid molecule. Alternatively, the homologous polypeptide may be one that is experimentally produced by directed mutation of one or more codons to alter the encoded amino acid of a CSP. In a preferred embodiment, the homologous polypeptide encodes a polypeptide that is a CSP.

[0242] Relatedness of proteins can also be characterized using a second functional test, such as the ability of a first protein competitively to inhibit the binding of a second protein to an antibody. It is, therefore, another aspect of the present invention to provide isolated polypeptides not only identical in sequence to those described with particularity herein, but also to provide isolated polypeptides (“cross-reactive proteins”) that competitively inhibit the binding of antibodies to all or to a portion of the isolated polypeptides of the present invention. Such competitive inhibition can readily be determined using immunoassays well known in the art.

[0243] As discussed above, single nucleotide polymorphisms (SNPs) occur frequently in eukaryotic genomes, and the sequence determined from one individual of a species may differ from other allelic forms present within the population. Thus, polypeptides of the present invention are also inclusive of those encoded by an allelic variant of a nucleic acid molecule encoding a CSP. In this embodiment, it is preferred that the polypeptide be encoded by an allelic variant of a gene that encodes a polypeptide having the amino acid sequence selected from the group consisting of SEQ ID NO: 96-237. More preferred is that the polypeptide be encoded by an allelic variant of a gene that has the nucleic acid sequence selected from the group consisting of SEQ ID NO: 1-95.

[0244] Polypeptides of the present invention are also inclusive of derivative polypeptides encoded by a nucleic acid molecule according to the instant invention. In this embodiment, it is preferred that the polypeptide be a CSP. Also preferred are derivative polypeptides having an amino acid sequence selected from the group consisting of SEQ ID NO: 96-237 and which has been acetylated, carboxylated, phosphorylated, glycosylated, ubiquitinated or post-translationally modified in another manner. In another preferred embodiment, the derivative has been labeled with, e.g., radioactive isotopes such as ¹²⁵I, ³²P, ³⁵S, and ³H. In another preferred embodiment, the derivative has been labeled with fluorophores, chemiluminescent agents, enzymes, and antiligands that can serve as specific binding pair members for a labeled ligand.

[0245] Polypeptide modifications are well known to those of skill and have been described in great detail in the scientific literature. Several particularly common modifications, glycosylation, lipid attachment, sulfation, gamma-carboxylation of glutamic acid residues, hydroxylation and ADP-ribosylation, for instance, are described in most basic texts, such as, for instance Creighton, Protein Structure and Molecular Properties, 2nd ed., W. H. Freeman and Company (1993). Many detailed reviews are available on this subject, such as, for example, those provided by Wold, in Johnson (ed.), Posttranslational Covalent Modification of Proteins, pgs. 1-12, Academic Press (1983); Seifter et al., Meth. Enzymol. 182: 626-646 (1990) and Rattan et al., Ann. N.Y. Acad. Sci. 663: 48-62 (1992).

[0246] One may determine whether a polypeptide of the invention is likely to be post-translationally modified by analyzing the sequence of the polypeptide to determine if there are peptide motifs indicative of sites for post-translational modification. There are a number of computer programs that permit prediction of post-translational modifications. See, e.g., expasy.org (accessed Nov. 11, 2002) of the world wide web, which includes PSORT, for prediction of protein sorting signals and localization sites, SignalP, for prediction of signal peptide cleavage sites, MITOPROT and Predotar, for prediction of mitochondrial targeting sequences, NetOGlyc, for prediction of type O-glycosylation sites in mammalian proteins, big-PI Predictor and DGPI, for prediction of prenylation-anchor and cleavage sites, and NetPhos, for prediction of Ser, Thr and Tyr phosphorylation sites in eukaryotic proteins. Other computer programs, such as those included in GCG, also may be used to determine post-translational modification peptide motifs.

[0247] General examples of types of post-translational modifications include, but are not limited to: (Z)-dehydrobutyrine; 1-chondroitin sulfate-L-aspartic acid ester; 1′-glycosyl-L-tryptophan; 1′-phospho-L-histidine; 1-thioglycine; 2′-(S-L-cysteinyl)-L-histidine; 2′-[3-carboxamido(trimethylammonio)propyl]-L-histidine; 2′-alpha-mannosyl-L-tryptophan; 2-methyl-L-glutamine; 2-oxobutanoic acid; 2-pyrrolidone carboxylic acid; 3′-(1′-L-histidyl)-L-tyrosine; 3′-(Salpha-FAD)-L-histidine; 3′-(S-L-cysteinyl)-L-tyrosine; 3′,3″,5′-triiodo-L-thyronine; 3′-4′-phospho-L-tyrosine; 3-hydroxy-L-proline; 3′-methyl-L-histidine; 3-methyl-L-lanthionine; 3′-phospho-L-histidine; 4′-(L-tryptophan)-L-tryptophyl quinone; 42 N-cysteinyl-glycosylphosphatidylinositolethanolamine; 43-(T-L-histidyl)-L-tyrosine; 4-hydroxy-L-arginine; 4-hydroxy-L-lysine; 4-hydroxy-L-proline; 5′-(N6-L-lysine)-L-topaquinone; 5-hydroxy-L-lysine; 5-methyl-L-arginine; alpha-1-microglobulin-Ig alpha complex chromophore; bis-L-cysteinyl bis-L-histidino diiron disulfide; bis-L-cysteinyl-L-N3′-histidino-L-serinyI tetrairon tetrasulfide; chondroitin sulfate D-glucuronyl-D-galactosyl-D-galactosyl-D-xylosyl-L-serine; D-alanine; D-allo-isoleucine; D-asparagine; dehydroalanine; dehydrotyrosine; dermatan 4-sulfate D-glucuronyl-D-galactosyl-D-galactosyl-D-xylosyl-L-serine; D-glucuronyl-N-glycine; dipyrrolylmethanemethyl-L-cysteine; D-leucine; D-methionine; D-phenylalanine; D-serine; D-tryptophan; glycine amide; glycine oxazolecarboxylic acid; glycine thiazolecarboxylic acid; heme P450-bis-L-cysteine-L-tyrosine; heme-bis-L-cysteine; hemediol-L-aspartyl ester-L-glutamyl ester; hemediol-L-aspartyl ester-L-glutamyl ester-L-methionine sulfonium; heme-L-cysteine; heme-L-histidine; heparan sulfate D-glucuronyl-D-galactosyl-D-galactosyl-D-xylosyl-L-serine; heme P450-bis-L-cysteine-L-lysine; hexakis-L-cysteinyl hexairon hexasulfide; keratan sulfate D-glucuronyl-D-galactosyl-D-galactosyl-D-xylosyl-L-threonine; L oxoalanine-lactic acid; L phenyllactic acid; 1′-(8alpha-FAD)-L-histidine; L-2′.4′,5′-topaquinone; L-3′,4′-dihydroxyphenylalanine; L-3′.4′.5′-trihydroxyphenylalanine; L-4′-bromophenylalanine; L-6′-bromotryptophan; L-alanine amide; L-alanyl imidazolinone glycine; L-allysine; L-arginine amide; L-asparagine amide; L-aspartic 4-phosphoric anhydride; L-aspartic acid 1-amide; L-beta-methylthioaspartic acid; L-bromohistidine; L-citrulline; L-cysteine amide; L-cysteine glutathione disulfide; L-cysteine methyl disulfide; L-cysteine methyl ester; L-cysteine oxazolecarboxylic acid; L-cysteine oxazolinecarboxylic acid; L-cysteine persulfide; L-cysteine sulfenic acid; L-cysteine sulfinic acid; L-cysteine thiazolecarboxylic acid; L-cysteinyl homocitryl molybdenum-heptairon-nonasulfide; L-cysteinyl imidazolinone glycine; L-cysteinyl molybdopterin; L-cysteinyl molybdopterin guanine dinucleotide; L-cystine; L-erythro-beta-hydroxyasparagine; L-erythro-beta-hydroxyaspartic acid; L-gamma-carboxyglutamic acid; L-glutamic acid 1-amide; L-glutamic acid 5-methyl ester; L-glutamine amide; L-glutamyl 5-glycerylphosphorylethanolamine; L-histidine amide; L-isoglutamyl-polyglutamic acid; L-isoglutamyl-polyglycine; L-isoleucine amide; L-lanthionine; L-leucine amide; L-lysine amide; L-lysine thiazolecarboxylic acid; L-lysinoalanine; L-methionine amide; L-methionine sulfone; L-phenyalanine thiazolecarboxylic acid; L-phenylalanine amide; L-proline amide; L-selenocysteine; L-selenocysteinyl molybdopterin guanine dinucleotide; L-serine amide; L-serine thiazolecarboxylic acid; L-seryl imidazolinone glycine; L-T-bromophenylalanine; L-T-bromophenylalanine; L-threonine amide; L-thyroxine; L-tryptophan amide; L-tryptophyl quinone; L-tyrosine amide; L-valine amide; meso-lanthionine; N-(L-glutamyl)-L-tyrosine; N-(L-isoaspartyl)-glycine; N-(L-isoaspartyl)-L-cysteine; N,N,N-trimethyl-L-alanine; N,N-dimethyl-L-proline; N2-acetyl-L-lysine; N2-succinyl-L-tryptophan; N4-(ADP-ribosyl)-L-asparagine; N4-glycosyl-L-asparagine; N4-hydroxymethyl-L-asparagine; N4-methyl-L-asparagine; N5-methyl-L-glutamine; N6-1-carboxyethyl-L-lysine; N6-(4-amino hydroxybutyl)-L-lysine; N6-(L-isoglutamyl)-L-lysine; N6-(phospho-5′-adenosine)-L-lysine; N6-(phospho-5′-guanosine)-L-lysine; N6,N6,N6-trimethyl-L-lysine; N6,N6-dimethyl-L-lysine; N6-acetyl-L-lysine; N6-biotinyl-L-lysine; N6-carboxy-L-lysine; N6-formyl-L-lysine; N6-glycyl-L-lysine; N6-lipoyl-L-lysine; N6-methyl-L-lysine; N6-methyl-N6-poly(N-methyl-propylamine)-L-lysine; N6-mureinyl-L-lysine; N6-myristoyl-L-lysine; N6-palmitoyl-L-lysine; N6-pyridoxal phosphate-L-lysine; N6-pyruvic acid 2-iminyl-L-lysine; N6-retinal-L-lysine; N-acetylglycine; N-acetyl-L-glutamine; N-acetyl-L-alanine; N-acetyl-L-aspartic acid; N-acetyl-L-cysteine; N-acetyl-L-glutamic acid; N-acetyl-L-isoleucine; N-acetyl-L-methionine; N-acetyl-L-proline; N-acetyl-L-serine; N-acetyl-L-threonine; N-acetyl-L-tyrosine; N-acetyl-L-valine; N-alanyl-glycosylphosphatidylinositolethanolamine; N-asparaginyl-glycosylphosphatidylinositolethanolamine; N-aspartyl-glycosylphosphatidylinositolethanolamine; N-formylglycine; N-formyl-L-methionine; N-glycyl-glycosylphosphatidylinositolethanolamine; N-L-glutamyl-poly-L-glutamic acid; N-methylglycine; N-methyl-L-alanine; N-methyl-L-methionine; N-methyl-L-phenylalanine; N-myristoyl-glycine; N-palmitoyl-L-cysteine; N-pyruvic acid 2-iminyl-L-cysteine; N-pyruvic acid 2-iminyl-L-valine; N-seryl-glycosylphosphatidylinositolethanolamine; N-seryl-glycosyCSPhingolipidinositolethanolamine; O-(ADP-ribosyl)-L-serine; O-(phospho-5′-adenosine)-L-threonine; O-(phospho-5′-DNA)-L-serine; O-(phospho-5′-DNA)-L-threonine; O-(phospho-5′rRNA)-L-serine; O-(phosphoribosyl dephospho-coenzyme A)-L-serine; O-(sn-1-glycerophosphoryl)-L-serine; O4′-(8alpha-FAD)-L-tyrosine; O4′-(phospho-5′-adenosine)-L-tyrosine; O4′-(phospho-5′-DNA)-L-tyrosine; O4′-(phospho-5′-RNA)-L-tyrosine; O4′-(phospho-5′-uridine)-L-tyrosine; O4-glycosyl-L-hydroxyproline; O4′-glycosyl-L-tyrosine; O4′-sulfo-L-tyrosine; O5-glycosyl-L-hydroxylysine; O-glycosyl-L-serine; O-glycosyl-L-threonine; omega-N-(ADP-ribosyl)-L-arginine; omega-N-omega-N′-dimethyl-L-arginine; omega-N-methyl-L-arginine; omega-N-omega-N-dimethyl-L-arginine; omega-N-phospho-L-arginine; O′octanoyl-L-serine; O-palmitoyl-L-serine; O-palmitoyl-L-threonine; O-phospho-L-serine; O-phospho-L-threonine; O-phosphopantetheine-L-serine; phycoerythrobilin-bis-L-cysteine; phycourobilin-bis-L-cysteine; pyrroloquinoline quinone; pyruvic acid; S hydroxycinnamyl-L-cysteine; S-(2-aminovinyl)methyl-D-eysteine; S-(2-aminovinyl)-D-cysteine; S-(6-FW-L-cysteine; S-(8alpha-FAD)-L-cysteine; S-(ADP-ribosyl)-L-cysteine; S-(L-isoglutamyl)-L-cysteine; S-12-hydroxyfarnesyl-L-cysteine; S-acetyl-L-cysteine; S-diacylglycerol-L-cysteine; S-diphytanylglycerot diether-L-cysteine; S-farnesyl-L-cysteine; S-geranylgeranyl-L-cysteine; S-glycosyl-L-cysteine; S-glycyl-L-cysteine; S-methyl-L-cysteine; S-nitrosyl-L-cysteine; S-palmitoyl-L-cysteine; S-phospho-L-cysteine; S-phycobiliviolin-L-cysteine; S-phycocyanobilin-L-cysteine; S-phycoerythrobilin-L-cysteine; S-phytochromobilin-L-cysteine; S-selenyl-L-cysteine; S-sulfo-L-cysteine; tetrakis-L-cysteinyl diiron disulfide; tetrakis-L-cysteinyl iron; tetrakis-L-cysteinyl tetrairon tetrasulfide; trans-2,3-cis 4-dihydroxy-L-proline; tris-L-cysteinyl triiron tetrasulfide; tris-L-cysteinyl triiron trisulfide; tris-L-cysteinyl-L-aspartato tetrairon tetrasulfide; tris-L-cysteinyl-L-cysteine persulfido-.bis-L-glutamato-L-histidino tetrairon disulfide trioxide; tris-L-cysteinyl-L-N3′-histidino tetrairon tetrasulfide; tris-L-cysteinyl-L-N1′-histidino tetrairon tetrasulfide; and tris-L-cysteinyl-L-serinyl tetrairon tetrasulfide.

[0248] Additional examples of PTMs may be found in web sites such as the Delta Mass database based on Krishna, R. G. and F. Wold (1998). Posttranslational Modifications. Proteins—Analysis and Design. R. H. Angeletti. San Diego, Academic Press. 1: 121-206; Methods in Enzymology, 193, J. A. McClosky (ed) (1990), pages 647-660; Methods in Protein Sequence Analysis edited by Kazutomo Imahori and Fumio Sakiyama, Plenum Press, (1993) “Post-translational modifications of proteins” R. G. Krishna and F. Wold pages 167-172; “GlycoSuiteDB: a new curated relational database of glycoprotein glycan structures and their biological sources” Cooper et al. Nucleic Acids Res. 29; 332-335 (2001) “O-GLYCBASE version 4.0: a revised database of O-glycosylated proteins” Gupta et al. Nucleic Acids Research, 27: 370-372 (1999); and “PhosphoBase, a database of phosphorylation sites: release 2.0.”, Kreegipuu et al. Nucleic Acids Res 27(l):237-239 (1999) see also, WO 02/21139A2, the disclosure of which is incorporated herein by reference in its entirety.

[0249] Tumorigenesis is often accompanied by alterations in the post-translational modifications of proteins. Thus, in another embodiment, the invention provides polypeptides from cancerous cells or tissues that have altered post-translational modifications compared to the post-translational modifications of polypeptides from normal cells or tissues. A number of altered post-translational modifications are known. One common alteration is a change in phosphorylation state, wherein the polypeptide from the cancerous cell or tissue is hyperphosphorylated or hypophosphorylated compared to the polypeptide from a normal tissue, or wherein the polypeptide is phosphorylated on different residues than the polypeptide from a normal cell. Another common alteration is a change in glycosylation state, wherein the polypeptide from the cancerous cell or tissue has more or less glycosylation than the polypeptide from a normal tissue, and/or wherein the polypeptide from the cancerous cell or tissue has a different type of glycosylation than the polypeptide from a noncancerous cell or tissue. Changes in glycosylation may be critical because carbohydrate-protein and carbohydrate-carbohydrate interactions are important in cancer cell progression, dissemination and invasion. See, e.g., Barchi, Curr. Pharm. Des. 6: 485-501 (2000), Verma, Cancer Biochem. Biophys. 14: 151-162 (1994) and Dennis et al., Bioessays 5:-412-421 (1999).

[0250] Another post-translational modification that may be altered in cancer cells is prenylation. Prenylation is the covalent attachment of a hydrophobic prenyl group (either farnesyl or geranylgeranyl) to a polypeptide. Prenylation is required for localizing a protein to a cell membrane and is often required for polypeptide function. For instance, the Ras superfamily of GTPase signalling proteins must be prenylated for function in a cell. See, e.g., Prendergast et al., Semin. Cancer Biol. 10: 443-452 (2000) and Khwaja et al., Lancet 355: 741-744 (2000).

[0251] Other post-translation modifications that may be altered in cancer cells include, without limitation, polypeptide methylation, acetylation, arginylation or racemization of amino acid residues. In these cases, the polypeptide from the cancerous cell may exhibit either increased or decreased amounts of the post-translational modification compared to the corresponding polypeptides from noncancerous cells.

[0252] Other polypeptide alterations in cancer cells include abnormal polypeptide cleavage of proteins and aberrant protein-protein interactions. Abnormal polypeptide cleavage may be cleavage of a polypeptide in a cancerous cell that does not usually occur in a normal cell, or a lack of cleavage in a cancerous cell, wherein the polypeptide is cleaved in a normal cell. Aberrant protein-protein interactions may be either covalent cross-linking or non-covalent binding between proteins that do not normally bind to each other. Alternatively, in a cancerous cell, a protein may fail to bind to another protein to which it is bound in a noncancerous cell. Alterations in cleavage or in protein-protein interactions may be due to over- or underproduction of a polypeptide in a cancerous cell compared to that in a normal cell, or may be due to alterations in post-translational modifications (see above) of one or more proteins in the cancerous cell. See, e.g., Henschen-Edman, Ann. N.Y. Acad. Sci. 936: 580-593 (2001).

[0253] Alterations in polypeptide post-translational modifications, as well as changes in polypeptide cleavage and protein-protein interactions, may be determined by any method known in the art. For instance, alterations in phosphorylation may be determined by using anti-phosphoserine, anti-phosphothreonine or anti-phosphotyrosine antibodies or by amino acid analysis. Glycosylation alterations may be determined using antibodies specific for different sugar residues, by carbohydrate sequencing, or by alterations in the size of the glycoprotein, which can be determined by, e.g., SDS polyacrylamide gel electrophoresis (PAGE). Other alterations of post-translational modifications, such as prenylation, racemization, methylation, acetylation and arginylation, may be determined by chemical analysis, protein sequencing, amino acid analysis, or by using antibodies specific for the particular post-translational modifications. Changes in protein-protein interactions and in polypeptide cleavage may be analyzed by any method known in the art including, without limitation, non-denaturing PAGE (for non-covalent protein-protein interactions), SDS PAGE (for covalent protein-protein interactions and protein cleavage), chemical cleavage, protein sequencing or immunoassays.

[0254] In another embodiment, the invention provides polypeptides that have been post-translationally modified. In one embodiment, polypeptides may be modified enzymatically or chemically, by addition or removal of a post-translational modification. For example, a polypeptide may be glycosylated or deglycosylated enzymatically. Similarly, polypeptides may be phosphorylated using a purified kinase, such as a MAP kinase (e.g, p38, ERK, or JNK) or a tyrosine kinase (e.g., Src or erbB2). A polypeptide may also be modified through synthetic chemistry. Alternatively, one may isolate the polypeptide of interest from a cell or tissue that expresses the polypeptide with the desired post-translational modification. In another embodiment, a nucleic acid molecule encoding the polypeptide of interest is introduced into a host cell that is capable of post-translationally modifying the encoded polypeptide in the desired fashion. If the polypeptide does not contain a motif for a desired post-translational modification, one may alter the post-translational modification by mutating the nucleic acid sequence of a nucleic acid molecule encoding the polypeptide so that it contains a site for the desired post-translational modification. Amino acid sequences that may be post-translationally modified are known in the art. See, e.g., the programs described above on the website expasy.org of the world wide web. The nucleic acid molecule may also be introduced into a host cell that is capable of post-translationally modifying the encoded polypeptide. Similarly, one may delete sites that are post-translationally modified by either mutating the nucleic acid sequence so that the encoded polypeptide does not contain the post-translational modification motif, or by introducing the native nucleic acid molecule into a host cell that is not capable of post-translationally modifying the encoded polypeptide.

[0255] It will be appreciated, as is well known and as noted above, that polypeptides are not always entirely linear. For instance, polypeptides may be branched as a result of ubiquitination, and they may be circular, with or without branching, generally as a result of posttranslation events, including natural processing events and events brought about by human manipulation which do not occur naturally. Circular, branched and branched circular polypeptides may be synthesized by non-translation natural processes and by entirely synthetic methods, as well. Modifications can occur anywhere in a polypeptide, including the peptide backbone, the amino acid side-chains and the amino or carboxyl termini. In fact, blockage of the amino or carboxyl group in a polypeptide, or both, by a covalent modification, is common in naturally occurring and synthetic polypeptides and such modifications may be present in polypeptides of the present invention, as well. For instance, the amino terminal residue of polypeptides made in E. coli, prior to proteolytic processing, almost invariably will be N-formylmethionine.

[0256] Useful post-synthetic (and post-translational) modifications include conjugation to detectable labels, such as fluorophores. A wide variety of amine-reactive and thiol-reactive fluorophore derivatives have been synthesized that react under nondenaturing conditions with N-terminal amino groups and epsilon amino groups of lysine residues, on the one hand, and with free thiol groups of cysteine residues, on the other.

[0257] Kits are available commercially that permit conjugation of proteins to a variety of amine-reactive or thiol-reactive fluorophores: Molecular Probes, Inc. (Eugene, Oreg., USA), e.g., offers kits for conjugating proteins to Alexa Fluor 350, Alexa Fluor 430, Fluorescein-EX, Alexa Fluor 488, Oregon Green 488, Alexa Fluor 532, Alexa Fluor 546, Alexa Fluor 546, Alexa Fluor 568, Alexa Fluor 594, and Texas Red-X.

[0258] A wide variety of other amine-reactive and thiol-reactive fluorophores are available commercially (Molecular Probes, Inc., Eugene, Oreg., USA), including Alexa Fluor® 350, Alexa Fluor® 488, Alexa Fluor® 532, Alexa Fluor® 546, Alexa Fluor® 568, Alexa Fluor® 594, Alexa Fluor® 647 (monoclonal antibody labeling kits available from Molecular Probes, Inc., Eugene, Oreg., USA), BODIPY dyes, such as BODIPY 493/503, BODIPY FL, BODIPY R6G, BODIPY 530/550, BODIPY TMR, BODIPY 558/568, BODIPY 558/568, BODIPY 564/570, BODIPY 576/589, BODIPY 581/591, BODIPY TR, BODIPY 630/650, BODIPY 650/665, Cascade Blue, Cascade Yellow, Dansyl, lissamine rhodamine B, Marina Blue, Oregon Green 488, Oregon Green 514, Pacific Blue, rhodamine 6G, rhodamine green, rhodamine red, tetramethylrhodamine, Texas Red (available from Molecular Probes, Inc., Eugene, Oreg., USA).

[0259] The polypeptides of the present invention can also be conjugated to fluorophores, other proteins, and other macromolecules, using bifunctional linking reagents. Common homobifunctional reagents include, e.g., APG, AEDP, BASED, BMB, BMDB, BMH, BMOE, BM[PEO]3, BM[PEO]4, BS3, BSOCOES, DFDNB, DMA, DMP, DMS, DPDPB, DSG, DSP (Lomant's Reagent), DSS, DST, DTBP, DTME, DTSSP, EGS, HBVS, Sulfo-BSOCOES, Sulfo-DST, Sulfo-EGS (all available from Pierce, Rockford, Ill., USA); common heterobifunctional cross-linkers include ABH, AMAS, ANB-NOS, APDP, ASBA, BMPA, BMPH, BMPS, EDC, EMCA, EMCH, EMCS, KMUA, KMUH, GMBS, LC-SMCC, LC-SPDP, MBS, M2C2H, MPBH, MSA, NHS-ASA, PDPH, PMPI, SADP, SAED, SAND, SANPAH, SASD, SATP, SBAP, SFAD, SIA, SIAB, SMCC, SMPB, SMPH, SMPT, SPDP, Sulfo-EMCS, Sulfo-GMBS, Sulfo-HSAB, Sulfo-KMUS, Sulfo-LC-SPDP, Sulfo-MBS, Sulfo-NHS-LC-ASA, Sulfo-SADP, Sulfo-SANPAH, Sulfo-SIAB, Sulfo-SMCC, Sulfo-SMPB, Sulfo-LC-SMPT, SVSB, TFCS (all available Pierce, Rockford, Ill., USA).

[0260] Polypeptides of the present invention, including full length polypeptides, fragments and fusion proteins, can be conjugated, using such cross-linking reagents, to fluorophores that are not amine- or thiol-reactive. Other labels that usefully can be conjugated to polypeptides of the present invention include radioactive labels, echosonographic contrast reagents, and MRI contrast agents.

[0261] Polypeptides of the present invention, including full length polypeptides, fragments and fusion proteins, can also usefully be conjugated using cross-linking agents to carrier proteins, such as KLH, bovine thyroglobulin, and even bovine serum albumin (BSA), to increase immunogenicity for raising anti-CSP antibodies.

[0262] Polypeptides of the present invention, including full length polypeptides, fragments and fusion proteins, can also usefully be conjugated to polyethylene glycol (PEG); PEGylation increases the serum half life of proteins administered intravenously for replacement therapy. Delgado et al., Crit. Rev. Ther. Drug Carrier Syst. 9(3-4): 249-304 (1992); Scott et al., Curr. Pharm. Des. 4(6): 423-38 (1998); DeSantis et al., Curr. Opin. Biotechnol. 10(4): 324-30 (1999). PEG monomers can be attached to the protein directly or through a linker, with PEGylation using PEG monomers activated with tresyl chloride (2,2,2-trifluoroethanesulphonyl chloride) permitting direct attachment under mild conditions.

[0263] Polypeptides of the present invention are also inclusive of analogs of a polypeptide encoded by a nucleic acid molecule according to the instant invention. In a preferred embodiment, this polypeptide is a CSP. In a more preferred embodiment, this polypeptide is derived from a polypeptide having part or all of the amino acid sequence of SEQ ID NO: 96-237. Also preferred is an analog polypeptide comprising one or more substitutions of non-natural amino acids or non-native inter-residue bonds compared to the naturally occurring polypeptide. In one embodiment, the analog is structurally similar to a CSP, but one or more peptide linkages is replaced by a linkage selected from the group consisting of —CH₂NH—, —CH₂S—, —CH₂—CH₂—, —CH═CH-(cis and trans), —COCH₂—, —CH(OH)CH₂— and CH₂SO—. In another embodiment, the analog comprises substitution of one or more amino acids of a CSP with a D-amino acid of the same type or other non-natural amino acid in order to generate more stable peptides. D-amino acids can readily be incorporated during chemical peptide synthesis: peptides assembled from D-amino acids are more resistant to proteolytic attack; incorporation of D-amino acids can also be used to confer specific three-dimensional conformations on the peptide. Other amino acid analogues commonly added during chemical synthesis include ornithine, norleucine, phosphorylated amino acids (typically phosphoserine, phosphothreonine, phosphotyrosine), L-malonyltyrosine, a non-hydrolyzable analog of phosphotyrosine (see, e.g., Kole et al., Biochem. Biophys. Res. Com. 209: 817-821 (1995)), and various halogenated phenylalanine derivatives.

[0264] Non-natural amino acids can be incorporated during solid phase chemical synthesis or by recombinant techniques, although the former is typically more common. Solid phase chemical synthesis of peptides is well established in the art. Procedures are described, inter alia, in Chan et al. (eds.), Fmoc Solid Phase Peptide Synthesis: A Practical Approach (Practical Approach Series), Oxford Univ. Press (March 2000); Jones, Amino Acid and Peptide Synthesis (Oxford Chemistry Primers, No 7), Oxford Univ. Press (1992); and Bodanszky, Principles of Peptide Synthesis (Springer Laboratory), Springer Verlag (1993).

[0265] Amino acid analogues having detectable labels are also usefully incorporated during synthesis to provide derivatives and analogs. Biotin, for example can be added using biotinoyl-(9-fluorenylmethoxycarbonyl)-L-lysine (FMOC biocytin) (Molecular Probes, Eugene, Oreg., USA). Biotin can also be added enzymatically by incorporation into a fusion protein of an E. coli BirA substrate peptide. The FMOC and tBOC derivatives of dabcyl-L-lysine (Molecular Probes, Inc., Eugene, Oreg., USA) can be used to incorporate the dabcyl chromophore at selected sites in the peptide sequence during synthesis. The aminonaphthalene derivative EDANS, the most common fluorophore for pairing with the dabcyl quencher in fluorescence resonance energy transfer (FRET) systems, can be introduced during automated synthesis of peptides by using EDANS-FMOC-L-glutamic acid or the corresponding tBOC derivative (both from Molecular Probes, Inc., Eugene, Oreg., USA). Tetramethylrhodamine fluorophores can be incorporated during automated FMOC synthesis of peptides using (FMOC)-TMR-L-lysine (Molecular Probes, Inc. Eugene, Oreg., USA).

[0266] Other useful amino acid analogues that can be incorporated during chemical synthesis include aspartic acid, glutamic acid, lysine, and tyrosine analogues having allyl side-chain protection (Applied Biosystems, Inc., Foster City, Calif., USA); the allyl side chain permits synthesis of cyclic, branched-chain, sulfonated, glycosylated, and phosphorylated peptides.

[0267] A large number of other FMOC-protected non-natural amino acid analogues capable of incorporation during chemical synthesis are available commercially, including, e.g., Fmoc-2-aminobicyclo[2.2.1]heptane-2-carboxylic acid, Fmoc-3-endo-aminobicyclo[2.2.1]heptane-2-endo-carboxylic acid, Fmoc-3-exo-aminobicyclo[2.2.1]heptane-2-exo-carboxylic acid, Fmoc-3-endo-amino-bicyclo[2.2.1]hept-5-ene-2-endo-carboxylic acid, Fmoc-3-exo-amino-bicyclo[2.2.1]hept-5-ene-2-exo-carboxylic acid, Fmoc-cis-2-amino-1-cyclohexanecarboxylic acid, Fmoc-trans-2-amino-1-cyclohexanecarboxylic acid, Fmoc-1-amino-1-cyclopentanecarboxylic acid, Fmoc-cis-2-amino-1-cyclopentanecarboxylic acid, Fmoc-1-amino-1-cyclopropanecarboxylic acid, Fmoc-D-2-amino-4-(ethylthio)butyric acid, Fmoc-L-2-amino-4-(ethylthio)butyric acid, Fmoc-L-buthionine, Fmoc-S-methyl-L-Cysteine, Fmoc-2-aminobenzoic acid (anthranillic acid), Fmoc-3-aminobenzoic acid, Fmoc-4-aminobenzoic acid, Fmoc-2-aminobenzophenone-2′-carboxylic acid, Fmoc-N-(4-aminobenzoyl)-β-alanine, Fmoc-2-amino-4,5-dimethoxybenzoic acid, Fmoc-4-aminohippuric acid, Fmoc-2-amino-3-hydroxybenzoic acid, Fmoc-2-amino-5-hydroxybenzoic acid, Fmoc-3-amino-4-hydroxybenzoic acid, Fmoc-4-amino-3-hydroxybenzoic acid, Fmoc-4-amino-2-hydroxybenzoic acid, Fmoc-5-amino-2-hydroxybenzoic acid, Fmoc-2-amino-3-methoxybenzoic acid, Fmoc-4-amino-3-methoxybenzoic acid, Fmoc-2-amino-3-methylbenzoic acid, Fmoc-2-amino-5-methylbenzoic acid, Fmoc-2-amino-6-methylbenzoic acid, Fmoc-3-amino-2-methylbenzoic acid, Fmoc-3-amino-4-methylbenzoic acid, Fmoc-4-amino-3-methylbenzoic acid, Fmoc-3-amino-2-naphtoic acid, Fmoc-D,L-3-amino-3-phenylpropionic acid, Fmoc-L-Methyldopa, Fmoc-2-amino-4,6-dimethyl-3-pyridinecarboxylic acid, Fmoc-D,L-amino-2-thiophenacetic acid, Fmoc-4-(carboxymethyl)piperazine, Fmoc-4-carboxypiperazine, Fmoc-4-(carboxymethyl)homopiperazine, Fmoc-4-phenyl-4-piperidinecarboxylic acid, Fmoc-L-1,2,3,4-tetrahydronorharman-3-carboxylic acid, Fmoc-L-thiazolidine-4-carboxylic acid, all available from The Peptide Laboratory (Richmond, Calif., USA).

[0268] Non-natural residues can also be added biosynthetically by engineering a suppressor tRNA, typically one that recognizes the UAG stop codon, by chemical aminoacylation with the desired unnatural amino acid. Conventional site-directed mutagenesis is used to introduce the chosen stop codon UAG at the site of interest in the protein gene. When the acylated suppressor tRNA and the mutant gene are combined in an in vitro transcription/translation system, the unnatural amino acid is incorporated in response to the UAG codon to give a protein containing that amino acid at the specified position. Liu et al., Proc. Natl Acad. Sci. USA 96(9): 4780-5 (1999); Wang et al., Science 292(5516): 498-500 (2001).

[0269] Fusion Proteins

[0270] Another aspect of the present invention relates to the fusion of a polypeptide of the present invention to heterologous polypeptides. In a preferred embodiment, the polypeptide of the present invention is a CSP. In a more preferred embodiment, the polypeptide of the present invention that is fused to a heterologous polypeptide which comprises part or all of the amino acid sequence of SEQ ID NO: 96-237, or is a mutein, homologous polypeptide, analog or derivative thereof. In an even more preferred embodiment, the fusion protein is encoded by a nucleic acid molecule comprising all or part of the nucleic acid sequence of SEQ ID NO: 1-95, or comprises all or part of a nucleic acid sequence that selectively hybridizes or is homologous to a nucleic acid molecule comprising a nucleic acid sequence of SEQ ID NO: 1-95.

[0271] The fusion proteins of the present invention will include at least one fragment of a polypeptide of the present invention, which fragment is at least 6, typically at least 8, often at least 15, and usefully at least 16, 17, 18, 19, or 20 amino acids long. The fragment of the polypeptide of the present to be included in the fusion can usefully be at least 25 amino acids long, at least 50 amino acids long, and can be at least 75, 100, or even 150 amino acids long. Fusions that include the entirety of a polypeptide of the present invention have particular utility.

[0272] The heterologous polypeptide included within the fusion protein of the present invention is at least 6 amino acids in length, often at least 8 amino acids in length, and preferably at least 15, 20, or 25 amino acids in length. Fusions that include larger polypeptides, such as the IgG Fc region, and even entire proteins (such as GFP chromophore-containing proteins) are particularly useful.

[0273] As described above in the description of vectors and expression vectors of the present invention, which discussion is incorporated here by reference in its entirety, heterologous polypeptides to be included in the fusion proteins of the present invention can usefully include those designed to facilitate purification and/or visualization of recombinantly-expressed proteins. See, e.g., Ausubel, Chapter 16, (1992), supra. Although purification tags can also be incorporated into fusions that are chemically synthesized, chemical synthesis typically provides sufficient purity that further purification by HPLC suffices; however, visualization tags as above described retain their utility even when the protein is produced by chemical synthesis, and when so included render the fusion proteins of the present invention useful as directly detectable markers of the presence of a polypeptide of the invention.

[0274] As also discussed above, heterologous polypeptides to be included in the fusion proteins of the present invention can usefully include those that facilitate secretion of recombinantly expressed proteins into the periplasmic space or extracellular milieu for prokaryotic hosts or into the culture medium for eukaryotic cells through incorporation of secretion signals and/or leader sequences. For example, a His⁶ tagged protein can be purified on a Ni affinity column and a GST fusion protein can be purified on a glutathione affinity column. Similarly, a fusion protein comprising the Fc domain of IgG can be purified on a Protein A or Protein G column and a fusion protein comprising an epitope tag such as myc can be purified using an immunoaffinity column containing an anti-c-myc antibody. It is preferable that the epitope tag be separated from the protein encoded by the essential gene by an enzymatic cleavage site that can be cleaved after purification. See also the discussion of nucleic acid molecules encoding fusion proteins that may be expressed on the surface of a cell.

[0275] Other useful fusion proteins of the present invention include those that permit use of the polypeptide of the present invention as bait in a yeast two-hybrid system. See Bartel et al. (eds:), The Yeast Two-Hybrid System, Oxford University Press (1997); Zhu et al., Yeast Hybrid Technologies, Eaton Publishing (2000); Fields et al., Trends Genet. 10(8): 286-92 (1994); Mendelsohn et al., Curr. Opin. Biotechnol. 5(5): 482-6 (1994); Luban et al., Curr. Opin. Biotechnol. 6(1): 59-64 (1995); Allen et al., Trends Biochem. Sci. 20(12): 511-6 (1995); Drees, Curr. Opin. Chem. Biol. 3(1): 64-70 (1999); Topcu et al., Pharm. Res. 17(9): 1049-55 (2000); Fashena et al., Gene 250(1-2): 1-14 (2000); Colas et al., Nature 380, 548-550 (1996); Norman, T. et al., Science 285, 591-595 (1999); Fabbrizio et al., Oncogene 18, 4357-4363 (1999); Xu et al., Proc Natl Acad Sci USA. 94, 12473-12478 (1997); Yang, et al., Nuc. Acids Res. 23, 1152-1156 (1995); Kolonin et al., Proc Natl Acad Sci USA 95, 14266-14271 (1998); Cohen et al., Proc Natl Acad Sci USA 95, 14272-14277 (1998); Uetz, et al. Nature 403, 623-627(2000); Ito, et al., Proc Natl Acad Sci USA 98, 4569-4574 (2001). Typically, such fusion is to either E. coli LexA or yeast GAL4 DNA binding domains. Related bait plasmids are available that express the bait fused to a nuclear localization signal.

[0276] Other useful fusion proteins include those that permit display of the encoded polypeptide on the surface of a phage or cell, fusions to intrinsically fluorescent proteins, such as green fluorescent protein (GFP), and fusions to the IgG Fc region, as described above.

[0277] The polypeptides of the present invention can also usefully be fused to protein toxins, such as Pseudomonas exotoxin A, diphtheria toxin, shiga toxin A, anthrax toxin lethal factor, or ricin, in order to effect ablation of cells that bind or take up the proteins of the present invention.

[0278] Fusion partners include, inter alia, myc, hemagglutinin (HA), GST, immunoglobulins, β-galactosidase, biotin trpE, protein A, β-lactamase, α-amylase, maltose binding protein, alcohol dehydrogenase, polyhistidine (for example, six histidine at the amino and/or carboxyl terminus of the polypeptide), lacZ, green fluorescent protein (GFP), yeast a mating factor, GAL4 transcription activation or DNA binding domain, luciferase, and serum proteins such as ovalbumin, albumin and the constant domain of IgG. See, e.g., Ausubel (1992), supra and Ausubel (1999), supra. Fusion proteins may also contain sites for specific enzymatic cleavage, such as a site that is recognized by enzymes such as Factor XIII, trypsin, pepsin, or any other enzyme known in the art. Fusion proteins will typically be made by either recombinant nucleic acid methods, as described above, chemically synthesized using techniques well known in the art (e.g. a Merrifield synthesis), or produced by chemical cross-linking.

[0279] Another advantage of fusion proteins is that the epitope tag can be used to bind the fusion protein to a plate or column through an affinity linkage for screening binding proteins or other molecules that bind to the CSP.

[0280] As further described below, the polypeptides of the present invention can readily be used as specific immunogens to raise antibodies that specifically recognize polypeptides of the present invention including CSPs and their allelic variants and homologues. The antibodies, in turn, can be used, inter alia, specifically to assay for the polypeptides of the present invention, particularly CSPs, e.g. by ELISA for detection of protein fluid samples, such as serum, by immunohistochemistry or laser scanning cytometry, for detection of protein in tissue samples, or by flow cytometry, for detection of intracellular protein in cell suspensions, for specific antibody-mediated isolation and/or purification of CSPs, as for example by immunoprecipitation, and for use as specific agonists or antagonists of CSPs.

[0281] One may determine whether polypeptides of the present invention including CSPs, muteins, homologous proteins or allelic variants or fusion proteins of the present invention are functional by methods known in the art. For instance, residues that are tolerant of change while retaining function can be identified by altering the polypeptide at known residues using methods known in the art, such as alanine scanning mutagenesis, Cunningham et al., Science 244(4908): 1081-5 (1989); transposon linker scanning mutagenesis, Chen et al., Gene 263(1-2): 39-48 (2001); combinations of homolog- and alanine-scanning mutagenesis, Jin et al., J. Mol. Biol. 226(3): 851-65 (1992); and combinatorial alanine scanning, Weiss et al., Proc. Natl. Acad. Sci USA 97(16): 8950-4 (2000), followed by functional assay. Transposon linker scanning kits are available commercially (New England Biolabs, Beverly, Mass., USA, catalog. no. E7-102S; EZ::TN™ In-Frame Linker Insertion Kit, catalogue no. EZI04KN, (Epicentre Technologies Corporation, Madison, Wis., USA).

[0282] Purification of the polypeptides or fusion proteins of the present invention is well known and within the skill of one having ordinary skill in the art. See, e.g., Scopes, Protein Purification, 2d ed. (1987). Purification of recombinantly expressed polypeptides is described above. Purification of chemically-synthesized peptides can readily be effected, e.g., by HPLC.

[0283] Accordingly, it is an aspect of the present invention to provide the isolated polypeptides or fusion proteins of the present invention in pure or substantially pure form in the presence or absence of a stabilizing agent. Stabilizing agents include both proteinaceous and non-proteinaceous material and are well known in the art. Stabilizing agents, such as albumin and polyethylene glycol (PEG) are known and are commercially available.

[0284] Although high levels of purity are preferred when the isolated polypeptide or fusion protein of the present invention are used as therapeutic agents, such as in vaccines and replacement therapy, the isolated polypeptides of the present invention are also useful at lower purity. For example, partially purified polypeptides of the present invention can be used as immunogens to raise antibodies in laboratory animals.

[0285] In a preferred embodiment, the purified and substantially purified polypeptides of the present invention are in compositions that lack detectable ampholytes, acrylamide monomers, bis-acrylamide monomers, and polyacrylamide.

[0286] The polypeptides or fusion proteins of the present invention can usefully be attached to a substrate. The substrate can be porous or solid, planar or non-planar; the bond can be covalent or noncovalent. For example, the peptides of the invention may be stabilized by covalent linkage to albumin. See, U.S. Pat. No. 5,876,969, the contents of which are hereby incorporated in its entirety.

[0287] The polypeptides or fusion proteins of the present invention can also be usefully bound to a porous substrate, commonly a membrane, typically comprising nitrocellulose, polyvinylidene fluoride (PVDF), or cationically derivatized, hydrophilic PVDF; so bound, the polypeptides or fusion proteins of the present invention can be used to detect and quantify antibodies, e.g. in serum, that bind specifically to the immobilized polypeptide or fusion protein of the present invention.

[0288] As another example, the polypeptides or fusion proteins of the present invention can usefully be bound to a substantially nonporous substrate, such as plastic, to detect and quantify antibodies, e.g. in serum, that bind specifically to the immobilized protein of the present invention. Such plastics include polymethylacrylic, polyethylene, polypropylene, polyacrylate, polymethylmethacrylate, polyvinylchloride, polytetrafluoroethylene, polystyrene, polycarbonate, polyacetal, polysulfone, celluloseacetate, cellulosenitrate, nitrocellulose, or mixtures thereof; when the assay is performed in a standard microtiter dish, the plastic is typically polystyrene.

[0289] The polypeptides and fusion proteins of the present invention can also be attached to a substrate suitable for use as a surface enhanced laser desorption ionization source; so attached, the polypeptide or fusion protein of the present invention is useful for binding and then detecting secondary proteins that bind with sufficient affinity or avidity to the surface-bound polypeptide or fusion protein to indicate biologic interaction there between. The polypeptides or fusion proteins of the present invention can also be attached to a substrate suitable for use in surface plasmon resonance detection; so attached, the polypeptide or fusion protein of the present invention is useful for binding and then detecting secondary proteins that bind with sufficient affinity or avidity to the surface-bound polypeptide or fusion protein to indicate biological interaction there between.

Alternative Transcripts

[0290] In another aspect, the present invention provides splice variants of genes and proteins encoded thereby. The identification of a novel splice variant which encodes an amino acid sequence with a novel region can be targeted for the generation of reagents for use in detection and/or treatment of cancer. The novel amino acid sequence may lead to a unique protein structure, protein subcellular localization, biochemical processing or function of the splice variant. This information can be used to directly or indirectly facilitate the generation of additional or novel therapeutics or diagnostics. The nucleotide sequence in this novel splice variant can be used as a nucleic acid probe for the diagnosis and/or treatment of cancer.

[0291] Specifically, the newly identified sequences may enable the production of new antibodies or compounds directed against the novel region for use as a therapeutic or diagnostic. Alternatively, the newly identified sequences may alter the biochemical or biological properties of the encoded protein in such a way as to enable the generation of improved or different therapeutics targeting this protein.

Antibodies

[0292] In another aspect, the invention provides antibodies, including fragments and derivatives thereof, that bind specifically to polypeptides encoded by the nucleic acid molecules of the invention. In a preferred embodiment, the antibodies are specific for a polypeptide that is a CSP, or a fragment, mutein, derivative, analog or fusion protein thereof. In a more preferred embodiment, the antibodies are specific for a polypeptide that comprises SEQ ID NO: 96-237, or a fragment, mutein, derivative, analog or fusion protein thereof.

[0293] The antibodies of the present invention can be specific for linear epitopes, discontinuous epitopes, or conformational epitopes of such proteins or protein fragments, either as present on the protein in its native conformation or, in some cases, as present on the proteins as denatured, as, e.g., by solubilization in SDS. New epitopes may also be due to a difference in post translational modifications (PTMs) in disease versus normal tissue. For example, a particular site on a CSP may be glycosylated in cancerous cells, but not glycosylated in normal cells or vice versa. In addition, alternative splice forms of a CSP may be indicative of cancer. Differential degradation of the C or N-terminus of a CSP may also be a marker or target for anticancer therapy. For example, a CSP may be N-terminal degraded in cancer cells exposing new epitopes to antibodies which may selectively bind for diagnostic or therapeutic uses.

[0294] As is well known in the art, the degree to which an antibody can discriminate among molecular species in a mixture will depend, in part, upon the conformational relatedness of the species in the mixture; typically, the antibodies of the present invention will discriminate over adventitious binding to non-CSP polypeptides by at least two-fold, more typically by at least 5-fold, typically by more than 10-fold, 25-fold, 50-fold, 75-fold, and often by more than 100-fold, and on occasion by more than 500-fold or 1000-fold. When used to detect the proteins or protein fragments of the present invention, the antibody of the present invention is sufficiently specific when it can be used to determine the presence of the polypeptide of the present invention in samples derived from human colon.

[0295] Typically, the affinity or avidity of an antibody (or antibody multimer, as in the case of an IgM pentamer) of the present invention for a protein or protein fragment of the present invention will be at least about 1×10⁻⁶ molar (M), typically at least about 5×10⁻⁷ M, 1×10⁻⁷ M, with affinities and avidities of at least 1×10⁻⁸ M, 5×10⁻⁹ M, 1×10⁻¹⁰ M and up to 1×10⁻¹³ M proving especially useful.

[0296] The antibodies of the present invention can be naturally occurring forms, such as IgG, IgM, IgD, IgE, IgY, and IgA, from any avian, reptilian, or mammalian species.

[0297] Human antibodies can, but will infrequently, be drawn directly from human donors or human cells. In such case, antibodies to the polypeptides of the present invention will typically have resulted from fortuitous immunization, such as autoimmune immunization, with the polypeptide of the present invention. Such antibodies will typically, but will not invariably, be polyclonal. In addition, individual polyclonal antibodies may be isolated and cloned to generate monoclonals.

[0298] Human antibodies are more frequently obtained using transgenic animals that express human immunoglobulin genes, which transgenic animals can be affirmatively immunized with the protein immunogen of the present invention. Human Ig-transgenic mice capable of producing human antibodies and methods of producing human antibodies therefrom upon specific immunization are described, inter alia, in U.S. Pat. Nos. 6,162,963; 6,150,584; 6,114,598; 6,075,181; 5,939,598; 5,877,397; 5,874,299; 5,814,318; 5,789,650; 5,770,429; 5,661,016; 5,633,425; 5,625,126; 5,569,825; 5,545,807; 5,545,806, and 5,591,669, the disclosures of which are incorporated herein by reference in their entireties. Such antibodies are typically monoclonal, and are typically produced using techniques developed for production of murine antibodies.

[0299] Human antibodies are particularly useful, and often preferred, when the antibodies of the present invention are to be administered to human beings as in vivo diagnostic or therapeutic agents, since recipient immune response to the administered antibody will often be substantially less than that occasioned by administration of an antibody derived from another species, such as mouse.

[0300] IgG, IgM, IgD, IgE, IgY, and IgA antibodies of the present invention are also usefully obtained from other species, including mammals such as rodents (typically mouse, but also rat, guinea pig, and hamster), lagomorphs (typically rabbits), and also larger mammals, such as sheep, goats, cows, and horses; or egg laying birds or reptiles such as chickens or alligators. In such cases, as with the transgenic human-antibody-producing non-human mammals, fortuitous immunization is not required, and the non-human mammal is typically affirmatively immunized, according to standard immunization protocols, with the polypeptide of the present invention. One form of avian antibodies may be generated using techniques described in WO 00/29444, published 25 May 2000, which is herein incorporated by reference in its entirety.

[0301] As discussed above, virtually all fragments of 8 or more contiguous amino acids of a polypeptide of the present invention can be used effectively as immunogens when conjugated to a carrier, typically a protein such as bovine thyroglobulin, keyhole limpet hemocyanin, or bovine serum albumin, conveniently using a bifunctional linker such as those described elsewhere above, which discussion is incorporated by reference here.

[0302] Immunogenicity can also be conferred by fusion of the polypeptides of the present invention to other moieties. For example, polypeptides of the present invention can be produced by solid phase synthesis on a branched polylysine core matrix; these multiple antigenic peptides (MAPs) provide high purity, increased avidity, accurate chemical definition and improved safety in vaccine development. Tam et al., Proc. Natl. Acad. Sci. USA 85: 5409-5413 (1988); Posnett et al., J. Biol. Chem. 263: 1719-1725 (1988).

[0303] Protocols for immunizing non-human mammals or avian species are well-established in the art. See Harlow et al. (eds.), Using Antibodies: A Laboratory Manual, Cold Spring Harbor Laboratory (1998); Coligan et al. (eds.), Current Protocols in Immunology, John Wiley & Sons, Inc. (2001); Zola, Monoclonal Antibodies: Preparation and Use of Monoclonal Antibodies and Engineered Antibody Derivatives (Basics: From Background to Bench), Springer Verlag (2000); Gross M, Speck J. Dtsch. Tierarztl. Wochenschr. 103: 417-422 (1996). Immunization protocols often include multiple immunizations, either with or without adjuvants such as Freund's complete adjuvant and Freund's incomplete adjuvant, and may include naked DNA immunization. Moss, Semin. Immunol. 2: 317-327 (1990).

[0304] Antibodies from non-human mammals and avian species can be polyclonal or monoclonal, with polyclonal antibodies having certain advantages in immunohistochemical detection of the polypeptides of the present invention and monoclonal antibodies having advantages in identifying and distinguishing particular epitopes of the polypeptides of the present invention. Antibodies from avian species may have particular advantage in detection of the polypeptides of the present invention, in human serum or tissues. Vikinge et al., Biosens. Bioelectron. 13: 1257-1262 (1998). Following immunization, the antibodies of the present invention can be obtained using any art-accepted technique. Such techniques are well known in the art and are described in detail in references such as Coligan, supra; Zola, supra; Howard et al. (eds.), Basic Methods in Antibody Production and Characterization, CRC Press (2000); Harlow, supra; Davis (ed.), Monoclonal Antibody Protocols, Vol. 45, Humana Press (1995); Delves (ed.), Antibody Production: Essential Techniques, John Wiley & Son Ltd (1997); and Kenney, Antibody Solution: An Antibody Methods Manual, Chapman & Hall (1997).

[0305] Briefly, such techniques include, inter alia, production of monoclonal antibodies by hybridomas and expression of antibodies or fragments or derivatives thereof from host cells engineered to express immunoglobulin genes or fragments thereof. These two methods of production are not mutually exclusive: genes encoding antibodies specific for the polypeptides of the present invention can be cloned from hybridomas and thereafter expressed in other host cells. Nor need the two necessarily be performed together: e.g., genes encoding antibodies specific for the polypeptides of the present invention can be cloned directly from B cells known to be specific for the desired protein, as further described in U.S. Pat. No. 5,627,052, the disclosure of which is incorporated herein by reference in its entirety, or from antibody-displaying phage.

[0306] Recombinant expression in host cells is particularly useful when fragments or derivatives of the antibodies of the present invention are desired.

[0307] Host cells for recombinant antibody production of whole antibodies, antibody fragments, or antibody derivatives can be prokaryotic or eukaryotic.

[0308] Prokaryotic hosts are particularly useful for producing phage displayed antibodies of the present invention.

[0309] The technology of phage-displayed antibodies, in which antibody variable region fragments are fused, for example, to the gene III protein (pIII) or gene VIII protein (pVIII) for display on the surface of filamentous phage, such as M13, is by now well-established. See, e.g., Sidhu, Curr. Opin. Biotechnol. 11(6): 610-6 (2000); Griffiths et al., Curr. Opin. Biotechnol. 9(1): 102-8 (1998); Hoogenboom et al., Immunotechnology, 4(1): 1-20 (1998); Rader et al., Current Opinion in Biotechnology 8: 503-508 (1997); Aujame et al., Human Antibodies 8: 155-168 (1997); Hoogenboom, Trends in Biotechnol. 15: 62-70 (1997); de Kruif et al., 17: 453-455 (1996); Barbas et al., Trends in Biotechnol. 14: 230-234 (1996); Winter et al., Ann. Rev. Immunol. 433-455 (1994). Techniques and protocols required to generate, propagate, screen (pan), and use the antibody fragments from such libraries have recently been compiled. See, e.g., Barbas (2001), supra; Kay, supra; and Abelson, supra.

[0310] Typically, phage-displayed antibody fragments are scFv fragments or Fab fragments; when desired, full length antibodies can be produced by cloning the variable regions from the displaying phage into a complete antibody and expressing the full length antibody in a further prokaryotic or a eukaryotic host cell. Eukaryotic cells are also useful for expression of the antibodies, antibody fragments, and antibody derivatives of the present invention. For example, antibody fragments of the present invention can be produced in Pichia pastoris and in Saccharomyces cerevisiae. See, e.g., Takahashi et al., Biosci. Biotechnol. Biochem. 64(10): 2138-44 (2000); Freyre et al., J. Biotechnol. 76(2-3): 157-63 (2000); Fischer et al., Biotechnol. Appl. Biochem. 30 (Pt 2): 117-20 (1999); Pennell et al., Res. Immunol. 149(6): 599-603 (1998); Eldin et al., J. Immunol. Methods. 201(1): 67-75 (1997); Frenken et al., Res. Immunol. 149(6): 589-99 (1998); and Shusta et al., Nature Biotechnol. 16(8): 773-7 (1998).

[0311] Antibodies, including antibody fragments and derivatives, of the present invention can also be produced in insect cells. See, e.g., Li et al., Protein Expr. Purif. 21(1): 121-8 (2001); Ailor et al., Biotechnol. Bioeng. 58(2-3): 196-203 (1998); Hsu et al., Biotechnol. Prog. 13(1): 96-104 (1997); Edelman et al., Immunology 91(1): 13-9 (1997); and Nesbit et al., J. Immunol. Methods 151(1-2): 201-8 (1992).

[0312] Antibodies and fragments and derivatives thereof of the present invention can also be produced in plant cells, particularly maize or tobacco, Giddings et al., Nature Biotechnol. 18(11): 1151-5 (2000); Gavilondo et al., Biotechniques 29(1): 128-38 (2000); Fischer et al., J. Biol. Regul. Homeost. Agents 14(2): 83-92 (2000); Fischer et al., Biotechnol. Appl. Biochem. 30 (Pt 2): 113-6 (1999); Fischer et al., Biol. Chem. 380(7-8): 825-39 (1999); Russell, Curr. Top. Microbiol. Immunol. 240: 119-38 (1999); and Ma et al., Plant Physiol. 109(2): 341-6 (1995).

[0313] Antibodies, including antibody fragments and derivatives, of the present invention can also be produced in transgenic, non-human, mammalian milk. See, e.g. Pollock et al., J. Immunol Methods. 231: 147-57 (1999); Young et al., Res. Immunol. 149: 609-10 (1998); and Limonta et al., Immunotechnology 1: 107-13 (1995).

[0314] Mammalian cells useful for recombinant expression of antibodies, antibody fragments, and antibody derivatives of the present invention include CHO cells, COS cells, 293 cells, and myeloma cells. Verma et al., J. Immunol. Methods 216(1-2):165-81 (1998) review and compare bacterial, yeast, insect and mammalian expression systems for expression of antibodies. Antibodies of the present invention can also be prepared by cell free translation, as further described in Merk et al., J. Biochem. (Tokyo) 125(2): 328-33 (1999) and Ryabova et al., Nature Biotechnol. 15(1): 79-84 (1997), and in the milk of transgenic animals, as further described in Pollock et al., J. Immunol. Methods 231(1-2): 147-57 (1999).

[0315] The invention further provides antibody fragments that bind specifically to one or more of the polypeptides of the present invention or to one or more of the polypeptides encoded by the isolated nucleic acid molecules of the present invention, or the binding of which can be competitively inhibited by one or more of the polypeptides of the present invention or one or more of the polypeptides encoded by the isolated nucleic acid molecules of the present invention. Among such useful fragments are Fab, Fab′, Fv, F(ab)′₂, and single-chain Fv (scFv) fragments. Other useful fragments are described in Hudson, Curr. Opin. Biotechnol. 9(4): 395-402 (1998).

[0316] The present invention also relates to antibody derivatives that bind specifically to one or more of the polypeptides of the present invention, to one or more of the polypeptides encoded by the isolated nucleic acid molecules of the present invention, or the binding of which can be competitively inhibited by one or more of the polypeptides of the present invention or one or more of the polypeptides encoded by the isolated nucleic acid molecules of the present invention.

[0317] Among such useful derivatives are chimeric, primatized, and humanized antibodies; such derivatives are less immunogenic in human beings, and thus are more suitable for ill vivo administration, than are unmodified antibodies from non-human mammalian species. Another useful method is PEGylation to increase the serum half life of the antibodies.

[0318] Chimeric antibodies typically include heavy and/or light chain variable regions (including both CDR and framework residues) of immunoglobulins of one species, typically mouse, fused to constant regions of another species, typically human. See, e.g., Morrison et al., Proc. Natl. Acad. Sci USA. 81(21): 6851-5 (1984); Sharon et al., Nature 309(5966): 364-7 (1984); Takeda et al., Nature 314(6010): 452-4 (1985); and U.S. Pat. No. 5,807,715 the disclosure of which is incorporated herein by reference in its entirety. Primatized and humanized antibodies typically include heavy and/or light chain CDRs from a murine antibody grafted into a non-human primate or human antibody V region framework, usually further comprising a human constant region, Riechmann et al., Nature 332(6162): 323-7 (1988); Co et al., Nature 351(6326): 501-2 (1991); and U.S. Pat. Nos. 6,054,297; 5,821,337; 5,770,196; 5,766,886; 5,821,123; 5,869,619; 6,180,377; 6,013,256; 5,693,761; and 6,180,370, the disclosures of which are incorporated herein by reference in their entireties. Other useful antibody derivatives of the invention include heteromeric antibody complexes and antibody fusions, such as diabodies (bispecific antibodies), single-chain diabodies, and intrabodies.

[0319] It is contemplated that the nucleic acids encoding the antibodies of the present invention can be operably joined to other nucleic acids forming a recombinant vector for cloning or for expression of the antibodies of the invention. Accordingly, the present invention includes any recombinant vector containing the coding sequences, or part thereof, whether for eukaryotic transduction, transfection or gene therapy. Such vectors may be prepared using conventional molecular biology techniques, known to those with skill in the art, and would comprise DNA encoding sequences for the immunoglobulin V-regions including framework and CDRs or parts thereof, and a suitable promoter either with or without a signal sequence for intracellular transport. Such vectors may be transduced or transfected into eukaryotic cells or used for gene therapy (Marasco et al., Proc. Natl. Acad. Sci. (USA) 90: 7889-7893 (1993); Duan et al., Proc. Natl. Acad. Sci. (USA) 91: 5075-5079 (1994), by conventional techniques, known to those with skill in the art.

[0320] The antibodies of the present invention, including fragments and derivatives thereof, can usefully be labeled. It is, therefore, another aspect of the present invention to provide labeled antibodies that bind specifically to one or more of the polypeptides of the present invention, to one or more of the polypeptides encoded by the isolated nucleic acid molecules of the present invention, or the binding of which can be competitively inhibited by one or more of the polypeptides of the present invention or one or more of the polypeptides encoded by the isolated nucleic acid molecules of the present invention. The choice of label depends, in part, upon the desired use.

[0321] For example, when the antibodies of the present invention are used for immunohistochemical staining of tissue samples, the label can usefully be an enzyme that catalyzes production and local deposition of a detectable product. Enzymes typically conjugated to antibodies to permit their immunohistochemical visualization are well known, and include alkaline phosphatase, β-galactosidase, glucose oxidase, horseradish peroxidase (HRP), and urease. Typical substrates for production and deposition of visually detectable products include o-nitrophenyl-beta-D-galactopyranoside (ONPG); o-phenylenediamine dihydrochloride (OPD); p-nitrophenyl phosphate (PNPP); p-nitrophenyl-beta-D-galactopryanoside (PNPG); 3′,3′-diaminobenzidine (DAB); 3-amino-9-ethylcarbazole (AEC); 4-chloro-1-naphthol (CN); 5-bromo-4-chloro-3-indolyl-phosphate (BCIP); ABTS®; BluoGal; iodonitrotetrazolium (INT); nitroblue tetrazolium chloride (NBT); phenazine methosulfate (PMS); phenolphthalein monophosphate (PMP); tetramethyl benzidine (TMB); tetranitroblue tetrazolium (TNBT); X-Gal; X-Gluc; and X-Glucoside.

[0322] Other substrates can be used to produce products for local deposition that are luminescent. For example, in the presence of hydrogen peroxide (H₂O₂), horseradish peroxidase (HRP) can catalyze the oxidation of cyclic diacylhydrazides, such as luminol. Immediately following the oxidation, the luminol is in an excited state (intermediate reaction product), which decays to the ground state by emitting light. Strong enhancement of the light emission is produced by enhancers, such as phenolic compounds. Advantages include high sensitivity, high resolution, and rapid detection without radioactivity and requiring only small amounts of antibody. See, e.g., Thorpe et al., Methods Enzymol. 133: 331-53 (1986); Kricka et al., J. Immunoassay 17(1): 67-83 (1996); and Lundqvist et al., J. Biolumin. Chemilumin. 10(6): 353-9 (1995). Kits for such enhanced chemiluminescent detection (ECL) are available commercially. The antibodies can also be labeled using colloidal gold.

[0323] As another example, when the antibodies of the present invention are used, e.g., for flow cytometric detection, for scanning laser cytometric detection, or for fluorescent immunoassay, they can usefully be labeled with fluorophores. There are a wide variety of fluorophore labels that can usefully be attached to the antibodies of the present invention. For flow cytometric applications, both for extracellular detection and for intracellular detection, common useful fluorophores can be fluorescein isothiocyanate (FITC), allophycocyanin (APC), R-phycoerythrin (PE), peridinin chlorophyll protein (PerCP), Texas Red, Cy3, Cy5, fluorescence resonance energy tandem fluorophores such as PerCP-Cy5.5, PE-Cy5, PE-Cy5.5, PE-Cy7, PE-Texas Red, and APC-Cy7.

[0324] Other fluorophores include, inter alia, Alexa Fluor® 350, Alexa Fluor® 488, Alexa Fluor® 532, Alexa Fluor® 546, Alexa Fluor® 568, Alexa Fluor® 594, Alexa Fluor® 647 (monoclonal antibody labeling kits available from Molecular Probes, Inc., Eugene, Oreg., USA), BODIPY dyes, such as BODIPY 493/503, BODIPY FL, BODIPY R6G, BODIPY 530/550, BODIPY TMR, BODIPY 558/568, BODIPY 558/568, BODIPY 564/570, BODIPY 576/589, BODIPY 581/591, BODIPY TR, BODIPY 630/650, BODIPY 650/665, Cascade Blue, Cascade Yellow, Dansyl, lissamine rhodamine B, Marina Blue, Oregon Green 488, Oregon Green 514, Pacific Blue, rhodamine 6G, rhodamine green, rhodamine red, tetramethylrhodamine, Texas Red (available from Molecular Probes, Inc., Eugene, Oreg., USA), and Cy2, Cy3, Cy3.5, Cy5, Cy5.5, Cy7, all of which are also useful for fluorescently labeling the antibodies of the present invention. For secondary detection using labeled avidin, streptavidin, captavidin or neutravidin, the antibodies of the present invention can usefully be labeled with biotin.

[0325] When the antibodies of the present invention are used, e.g., for western blotting applications, they can usefully be labeled with radioisotopes, such as ³³P, ³²P, ³⁵S, ³H, and ¹²⁵I. As another example, when the antibodies of the present invention are used for radioimmunotherapy, the label can usefully be ²²⁸Th, ²²⁷Ac, ²²⁵Ac, ²²³Ra, ²¹³Bi, ²¹²Pb, ²¹²Bi, ²¹¹At, ²⁰³Pb, ¹⁹⁴Os, ¹⁸⁸Re, ¹⁸⁶Re, ¹⁵³Sm, ¹⁴⁹Tb, ¹³¹I, ¹²⁵I, ¹¹¹In, ¹⁰⁵Rh, ^{99m}Tc, ⁹⁷Ru, ⁹⁰Y, ⁹⁰Sr, ⁸⁸Y, ⁷²Se, ⁶⁷Cu, or ⁴⁷Sc.

[0326] As another example, when the antibodies of the present invention are to be used for in vivo diagnostic use, they can be rendered detectable by conjugation to MRI contrast agents, such as gadolinium diethylenetriaminepentaacetic acid (DTPA), Lauffer et al., Radiology 207(2): 529-38 (1998), or by radioisotopic labeling.

[0327] As would be understood, use of the labels described above is not restricted to the application as for which they were mentioned.

[0328] The antibodies of the present invention, including fragments and derivatives thereof, can also be conjugated to toxins, in order to target the toxin's ablative action to cells that display and/or express the polypeptides of the present invention. Commonly, the antibody in such immunotoxins is conjugated to Pseudomonas exotoxin A, diphtheria toxin, shiga toxin A, anthrax toxin lethal factor, or ricin. See Hall (ed.), Immunotoxin Methods and Protocols (Methods in Molecular Biology, vol. 166), Humana Press (2000); and Frankel et al. (eds.), Clinical Applications of Immunotoxins, Springer-Verlag (1998).

[0329] The antibodies of the present invention can usefully be attached to a substrate, and it is, therefore, another aspect of the invention to provide antibodies that bind specifically to one or more of the polypeptides of the present invention, to one or more of the polypeptides encoded by the isolated nucleic acid molecules of the present invention, or the binding of which can be competitively inhibited by one or more of the polypeptides of the present invention or one or more of the polypeptides encoded by the isolated nucleic acid molecules of the present invention, attached to a substrate. Substrates can be porous or nonporous, planar or nonplanar. For example, the antibodies of the present invention can usefully be conjugated to filtration media, such as NHS-activated Sepharose or CNBr-activated Sepharose for purposes of immunoaffinity chromatography. For example, the antibodies of the present invention can usefully be attached to paramagnetic microspheres, typically by biotin-streptavidin interaction, which microsphere can then be used for isolation of cells that express or display the polypeptides of the present invention. As another example, the antibodies of the present invention can usefully be attached to the surface of a microtiter plate for ELISA.

[0330] As noted above, the antibodies of the present invention can be produced in prokaryotic and eukaryotic cells. It is, therefore, another aspect of the present invention to provide cells that express the antibodies of the present invention, including hybridoma cells, B cells, plasma cells, and host cells recombinantly modified to express the antibodies of the present invention.

[0331] In yet a further aspect, the present invention provides aptamers evolved to bind specifically to one or more of the CSPs of the present invention or to polypeptides encoded by the CSNAs of the invention.

[0332] In sum, one of skill in the art, provided with the teachings of this invention, has available a variety of methods which may be used to alter the biological properties of the antibodies of this invention including methods which would increase or decrease the stability or half-life, immunogenicity, toxicity, affinity or yield of a given antibody molecule, or to alter it in any other way that may render it more suitable for a particular application.

Transgenic Animals and Cells

[0333] In another aspect, the invention provides transgenic cells and non-human organisms comprising nucleic acid molecules of the invention. In a preferred embodiment, the transgenic cells and non-human organisms comprise a nucleic acid molecule encoding a CSP. In a preferred embodiment, the CSP comprises an amino acid sequence selected from SEQ ID NO: 96-237, or a fragment, mutein, homologous protein or allelic variant thereof. In another preferred embodiment, the transgenic cells and non-human organism comprise a CSNA of the invention, preferably a CSNA comprising a nucleotide sequence selected from the group consisting of SEQ ID NO: 1-95, or a part, substantially similar nucleic acid molecule, allelic variant or hybridizing nucleic acid molecule thereof.

[0334] In another embodiment, the transgenic cells and non-human organisms have a targeted disruption or replacement of the endogenous orthologue of the human CSG. The transgenic cells can be embryonic stem cells or somatic cells. The transgenic non-human organisms can be chimeric, nonchimeric heterozygotes, and nonchimeric homozygotes. Methods of producing transgenic animals are well known in the art. See, e.g., Hogan et al., Manipulating the Mouse Embryo: A Laboratory Manual, 2d ed., Cold Spring Harbor Press (1999); Jackson et al., Mouse Genetics and Transgenics: A Practical Approach, Oxford University Press (2000); and Pinkert, Transgenic Animal Technology: A Laboratory Handbook, Academic Press (1999).

[0335] Any technique known in the art may be used to introduce a nucleic acid molecule of the invention into an animal to produce the founder lines of transgenic animals. Such techniques include, but are not limited to, pronuclear microinjection. (see, e.g., Paterson et al., Appl. Microbiol. Biotechnol. 40: 691-698 (1994); Carver et al., Biotechnology 11: 1263-1270 (1993); Wright et al., Biotechnology 9: 830-834 (1991); and U.S. Pat. No. 4,873,191, herein incorporated by reference in its entirety); retrovirus-mediated gene transfer into germ lines, blastocysts or embryos (see, e.g., Van der Putten et al., Proc. Natl. Acad. Sci., USA 82: 6148-6152 (1985)); gene targeting in embryonic stem cells (see, e.g., Thompson et al., Cell 56: 313-321 (1989)); electroporation of cells or embryos (see, e.g., Lo, 1983, Mol. Cell. Biol. 3: 1803-1814 (1983)); introduction using a gene gun (see, e.g., Ulmer et al., Science 259: 1745-49 (1993); introducing nucleic acid constructs into embryonic pleuripotent stem cells and transferring the stem cells back into the blastocyst; and sperm-mediated gene transfer (see, e.g., Lavitrano et al., Cell 57: 717-723 (1989)).

[0336] Other techniques include, for example, nuclear transfer into enucleated oocytes of nuclei from cultured embryonic, fetal, or adult cells induced to quiescence (see, e.g., Campell et al., Nature 380: 64-66 (1996); Wilmut et al., Nature 385: 810-813 (1997)). The present invention provides for transgenic animals that carry the transgene (i.e., a nucleic acid molecule of the invention) in all their cells, as well as animals which carry the transgene in some, but not all their cells, i.e. e., mosaic animals or chimeric animals.

[0337] The transgene may be integrated as a single transgene or as multiple copies, such as in concatamers, e.g., head-to-head tandems or head-to-tail tandems. The transgene may also be selectively introduced into and activated in a particular cell type by following, e.g., the teaching of Lasko et al. et al., Proc. Natl. Acad. Sci. USA 89: 6232-6236 (1992). The regulatory sequences required for such a cell-type specific activation will depend upon the particular cell type of interest, and will be apparent to those of skill in the art.

[0338] Once transgenic animals have been generated, the expression of the recombinant gene may be assayed utilizing standard techniques. Initial screening may be accomplished by Southern blot analysis or PCR techniques to analyze animal tissues to verify that integration of the transgene has taken place. The level of mRNA expression of the transgene in the tissues of the transgenic animals may also be assessed using techniques which include, but are not limited to, Northern blot analysis of tissue samples obtained from the animal, in situ hybridization analysis, and reverse transcriptase-PCR (RT-PCR). Samples of transgenic gene-expressing tissue may also be evaluated immunocytochemically or immunohistochemically using antibodies specific for the transgene product.

[0339] Once the founder animals are produced, they may be bred, inbred, outbred, or crossbred to produce colonies of the particular animal. Examples of such breeding strategies include, but are not limited to: outbreeding of founder animals with more than one integration site in order to establish separate lines; inbreeding of separate lines in order to produce compound transgenics that express the transgene at higher levels because of the effects of additive expression of each transgene; crossing of heterozygous transgenic animals to produce animals homozygous for a given integration site in order to both augment expression and eliminate the need for screening of animals by DNA analysis; crossing of separate homozygous lines to produce compound heterozygous or homozygous lines; and breeding to place the transgene on a distinct background that is appropriate for an experimental model of interest.

[0340] Transgenic animals of the invention have uses which include, but are not limited to, animal model systems useful in elaborating the biological function of polypeptides of the present invention, studying conditions and/or disorders associated with aberrant expression, and in screening for compounds effective in ameliorating such conditions and/or disorders.

[0341] Methods for creating a transgenic animal with a disruption of a targeted gene are also well known in the art. In general, a vector is designed to comprise some nucleotide sequences homologous to the endogenous targeted gene. The vector is introduced into a cell so that it may integrate, via homologous recombination with chromosomal sequences, into the endogenous gene, thereby disrupting the function of the endogenous gene. The transgene may also be selectively introduced into a particular cell type, thus inactivating the endogenous gene in only that cell type. See, e.g., Gu et al., Science 265: 103-106 (1994). The regulatory sequences required for such a cell-type specific inactivation will depend upon the particular cell type of interest, and will be apparent to those of skill in the art. See, e.g., Smithies et al., Nature 317: 230-234 (1985); Thomas et al., Cell 51: 503-512 (1987); Thompson et al., Cell 5: 313-321 (1989).

[0342] In one embodiment, a mutant, non-functional nucleic acid molecule of the invention (or a completely unrelated DNA sequence) flanked by DNA homologous to the endogenous nucleic acid sequence (either the coding regions or regulatory regions of the gene) can be used, with or without a selectable marker and/or a negative selectable marker, to transfect cells that express polypeptides of the invention in vivo. In another embodiment, techniques known in the art are used to generate knockouts in cells that contain, but do not express the gene of interest. Insertion of the DNA construct, via targeted homologous recombination, results in inactivation of the targeted gene. Such approaches are particularly suited in research and agricultural fields where modifications to embryonic stem cells can be used to generate animal offspring with an inactive targeted gene. See, e.g., Thomas, supra and Thompson, supra. However this approach can be routinely adapted for use in humans provided the recombinant DNA constructs are directly administered or targeted to the required site in vivo using appropriate viral vectors that will be apparent to those of skill in the art.

[0343] In further embodiments of the invention, cells that are genetically engineered to express the polypeptides of the invention, or alternatively, that are genetically engineered not to express the polypeptides of the invention (e.g., knockouts) are administered to a patient in vivo. Such cells may be obtained from an animal or patient or an MHC compatible donor and can include, but are not limited to fibroblasts, bone marrow cells, blood cells (e.g., lymphocytes), adipocytes, muscle cells, endothelial cells etc. The cells are genetically engineered in vitro using recombinant DNA techniques to introduce the coding sequence of polypeptides of the invention into the cells, or alternatively, to disrupt the coding sequence and/or endogenous regulatory sequence associated with the polypeptides of the invention, e.g., by transduction (using viral vectors, and preferably vectors that integrate the transgene into the cell genome) or transfection procedures, including, but not limited to, the use of plasmids, cosmids, YACs, naked DNA, electroporation, liposomes, etc.

[0344] The coding sequence of the polypeptides of the invention can be placed under the control of a strong constitutive or inducible promoter or promoter/enhancer to achieve expression, and preferably secretion, of the polypeptides of the invention. The engineered cells which express and preferably secrete the polypeptides of the invention can be introduced into the patient systemically, e.g. in the circulation, or intraperitoneally.

[0345] Alternatively, the cells can be incorporated into a matrix and implanted in the body, e.g., genetically engineered fibroblasts can be implanted as part of a skin graft; genetically engineered endothelial cells can be implanted as part of a lymphatic or vascular graft. See, e.g., U.S. Pat. Nos. 5,399,349 and 5,460,959, each of which is incorporated by reference herein in its entirety.

[0346] When the cells to be administered are non-autologous or non-MHC compatible cells, they can be administered using well known techniques which prevent the development of a host immune response against the introduced cells. For example, the cells may be introduced in an encapsulated form which, while allowing for an exchange of components with the immediate extracellular environment, does not allow the introduced cells to be recognized by the host immune system.

[0347] Transgenic and “knock-out” animals of the invention have uses which include, but are not limited to, animal model systems useful in elaborating the biological function of polypeptides of the present invention, studying conditions and/or disorders associated with aberrant expression, and in screening for compounds effective in ameliorating such conditions and/or disorders.

Computer Readable Means

[0348] A further aspect of the invention is a computer readable means for storing the nucleic acid and amino acid sequences of the instant invention. In a preferred embodiment, the invention provides a computer readable means for storing SEQ ID NO: 96-237 and SEQ ID NO: 1-95 as described herein, as the complete set of sequences or in any combination. The records of the computer readable means can be accessed for reading and display and for interface with a computer system for the application of programs allowing for the location of data upon a query for data meeting certain criteria, the comparison of sequences, the alignment or ordering of sequences meeting a set of criteria, and the like.

[0349] The nucleic acid and amino acid sequences of the invention are particularly useful as components in databases useful for search analyses as well as in sequence analysis algorithms. As used herein, the terms “nucleic acid sequences of the invention” and “amino acid sequences of the invention” mean any detectable chemical or physical characteristic of a polynucleotide or polypeptide of the invention that is or may be reduced to or stored in a computer readable form. These include, without limitation, chromatographic scan data or peak data, photographic data or scan data therefrom, and mass spectrographic data.

[0350] This invention provides computer readable media having stored thereon sequences of the invention. A computer readable medium may comprise one or more of the following: a nucleic acid sequence comprising a sequence of a nucleic acid sequence of the invention; an amino acid sequence comprising an amino acid sequence of the invention; a set of nucleic acid sequences wherein at least one of said sequences comprises the sequence of a nucleic acid sequence of the invention; a set of amino acid sequences wherein at least one of said sequences comprises the sequence of an amino acid sequence of the invention; a data set representing a nucleic acid sequence comprising the sequence of one or more nucleic acid sequences of the invention; a data set representing a nucleic acid sequence encoding an amino acid sequence comprising the sequence of an amino acid sequence of the invention; a set of nucleic acid sequences wherein at least one of said sequences comprises the sequence of a nucleic acid sequence of the invention; a set of amino acid sequences wherein at least one of said sequences comprises the sequence of an amino acid sequence of the invention; a data set representing a nucleic acid sequence comprising the sequence of a nucleic acid sequence of the invention; a data set representing a nucleic acid sequence encoding an amino acid sequence comprising the sequence of an amino acid sequence of the invention. The computer readable medium can be any composition of matter used to store information or data, including, for example, commercially available floppy disks, tapes, hard drives, compact disks, and video disks.

[0351] Also provided by the invention are methods for the analysis of character sequences, particularly genetic sequences. Preferred methods of sequence analysis include, for example, methods of sequence homology analysis, such as identity and similarity analysis, RNA structure analysis, sequence assembly, cladistic analysis, sequence motif analysis, open reading frame determination, nucleic acid base calling, and sequencing chromatogram peak analysis.

[0352] A computer-based method is provided for performing nucleic acid sequence identity or similarity identification. This method comprises the steps of providing a nucleic acid sequence comprising the sequence of a nucleic acid of the invention in a computer readable medium; and comparing said nucleic acid sequence to at least one nucleic acid or amino acid sequence to identify sequence identity or similarity.

[0353] A computer-based method is also provided for performing amino acid homology identification, said method comprising the steps of: providing an amino acid sequence comprising the sequence of an amino acid of the invention in a computer readable medium; and comparing said amino acid sequence to at least one nucleic acid or an amino acid sequence to identify homology.

[0354] A computer-based method is still further provided for assembly of overlapping nucleic acid sequences into a single nucleic acid sequence, said method comprising the steps of: providing a first nucleic acid sequence comprising the sequence of a nucleic acid of the invention in a computer readable medium; and screening for at least one overlapping region between said first nucleic acid sequence and a second nucleic acid sequence. In addition, the invention includes a method of using patterns of expression associated with either the nucleic acids or proteins in a computer-based method to diagnose disease.

Diagnostic Methods for Colon Cancer

[0355] The present invention also relates to quantitative and qualitative diagnostic assays and methods for detecting, diagnosing, monitoring, staging and predicting cancers by comparing expression of a CSNA or a CSP in a human patient that has or may have colon cancer, or who is at risk of developing colon cancer, with the expression of a CSNA or a CSP in a normal human control. For purposes of the present invention, “expression of a CSNA” or “CSNA expression” means the quantity of CSNA mRNA that can be measured by any method known in the art or the level of transcription that can be measured by any method known in the art in a cell, tissue, organ or whole patient. Similarly, the term “expression of a CSP” or “CSP expression” means the amount of CSP that can be measured by any method known in the art or the level of translation of a CSNA that can be measured by any method known in the art.

[0356] The present invention provides methods for diagnosing colon cancer in a patient, in particular adenocarcinoma, by analyzing for changes in levels of CSNA or CSP in cells, tissues, organs or bodily fluids compared with levels of CSNA or CSP in cells, tissues, organs or bodily fluids of preferably the same type from a normal human control, wherein an increase, or decrease in certain cases, in levels of a CSNA or CSP in the patient versus the normal human control is associated with the presence of colon cancer or with a predilection to the disease. In another preferred embodiment, the present invention provides methods for diagnosing colon cancer in a patient by analyzing changes in the structure of the mRNA of a CSG compared to the mRNA from a normal control. These changes include, without limitation, aberrant splicing, alterations in polyadenylation and/or alterations in 5′ nucleotide capping. In yet another preferred embodiment, the present invention provides methods for diagnosing colon cancer in a patient by analyzing changes in a CSP compared to a CSP from a normal patient. These changes include, e.g., alterations, including post translational modifications such as glycosylation and/or phosphorylation of the CSP or changes in the subcellular CSP localization.

[0357] For purposes of the present invention, diagnosing means that CSNA or CSP levels are used to determine the presence or absence of disease in a patient. As will be understood by those of skill in the art, measurement of other diagnostic parameters may be required for definitive diagnosis or determination of the appropriate treatment for the disease. The determination may be made by a clinician, a doctor, a testing laboratory, or a patient using an over the counter test. The patient may have symptoms of disease or may be asymptomatic. In addition, the CSNA or CSP levels of the present invention may be used as screening marker to determine whether further tests or biopsies are warranted. In addition, the CSNA or CSP levels may be used to determine the vulnerability or susceptibility to disease.

[0358] In a preferred embodiment, the expression of a CSNA is measured by determining the amount of a mRNA that encodes an amino acid sequence selected from SEQ ID NO: 96-237, a homolog, an allelic variant, or a fragment thereof. In a more preferred embodiment, the CSNA expression that is measured is the level of expression of a CSNA mRNA selected from SEQ ID NO: 1-95, or a hybridizing nucleic acid, homologous nucleic acid or allelic variant thereof, or a part of any of these nucleic acid molecules. CSNA expression may be measured by any method known in the art, such as those described supra, including measuring mRNA expression by Northern blot, quantitative or qualitative reverse transcriptase PCR (RT-PCR), microarray, dot or slot blots or in situ hybridization. See, e.g., Ausubel (1992), supra; Ausubel (1999), supra; Sambrook (1989), supra; and Sambrook (2001), supra. CSNA transcription may be measured by any method known in the art including using a reporter gene hooked up to the promoter of a CSG of interest or doing nuclear run-off assays. Alterations in mRNA structure, e.g., aberrant splicing variants, may be determined by any method known in the art, including, RT-PCR followed by sequencing or restriction analysis. As necessary, CSNA expression may be compared to a known control, such as normal colon nucleic acid, to detect a change in expression.

[0359] In another preferred embodiment, the expression of a CSP is measured by determining the level of a CSP having an amino acid sequence selected from the group consisting of SEQ ID NO: 96-237, a homolog, an allelic variant, or a fragment thereof. Such levels are preferably determined in at least one of cells, tissues, organs and/or bodily fluids, including determination of normal and abnormal levels. Thus, for instance, a diagnostic assay in accordance with the invention for diagnosing over- or underexpression of a CSNA or CSP compared to normal control bodily fluids, cells, or tissue samples may be used to diagnose the presence of colon cancer. The expression level of a CSP may be determined by any method known in the art, such as those described supra. In a preferred embodiment, the CSP expression level may be determined by radioimmunoassays, competitive-binding assays, ELISA, Western blot, FACS, immunohistochemistry, immunoprecipitation, proteomic approaches: two-dimensional gel electrophoresis (2D electrophoresis) and non-gel-based approaches such as mass spectrometry or protein interaction profiling. See, e.g, Harlow (1999), supra; Ausubel (1992), supra; and Ausubel (1999), supra. Alterations in the CSP structure may be determined by any method known in the art, including, e.g., using antibodies that specifically recognize phosphoserine, phosphothreonine or phosphotyrosine residues, two-dimensional polyacrylamide gel electrophoresis (2D PAGE) and/or chemical analysis of amino acid residues of the protein. Id.

[0360] In a preferred embodiment, a radioimmunoassay (RIA) or an ELISA is used. An antibody specific to a CSP is prepared if one is not already available. In a preferred embodiment, the antibody is a monoclonal antibody. The anti-CSP antibody is bound to a solid support and any free protein binding sites on the solid support are blocked with a protein such as bovine serum albumin. A sample of interest is incubated with the antibody on the solid support under conditions in which the CSP will bind to the anti-CSP antibody. The sample is removed, the solid support is washed to remove unbound material, and an anti-CSP antibody that is linked to a detectable reagent (a radioactive substance for RIA and an enzyme for ELISA) is added to the solid support and incubated under conditions in which binding of the CSP to the labeled antibody will occur. After binding, the unbound labeled antibody is removed by washing. For an ELISA, one or more substrates are added to produce a colored reaction product that is based upon the amount of a CSP in the sample. For an RIA, the solid support is counted for radioactive decay signals by any method known in the art. Quantitative results for both RIA and ELISA typically are obtained by reference to a standard curve.

[0361] Other methods to measure CSP levels are known in the art. For instance, a competition assay may be employed wherein an anti-CSP antibody is attached to a solid support and an allocated amount of a labeled CSP and a sample of interest are incubated with the solid support. The amount of labeled CSP attached to the solid support can be correlated to the quantity of a CSP in the sample.

[0362] Of the proteomic approaches, 2D PAGE is a well known technique. Isolation of individual proteins from a sample such as serum is accomplished using sequential separation of proteins by isoelectric point and molecular weight. Typically, polypeptides are first separated by isoelectric point (the first dimension) and then separated by size using an electric current (the second dimension). In general, the second dimension is perpendicular to the first dimension. Because no two proteins with different sequences are identical on the basis of both size and charge, the result of 2D PAGE is a roughly square gel in which each protein occupies a unique spot. Analysis of the spots with chemical or antibody probes, or subsequent protein microsequencing can reveal the relative abundance of a given protein and the identity of the proteins in the sample.

[0363] Expression levels of a CSNA can be determined by any method known in the art, including PCR and other nucleic acid methods, such as ligase chain reaction (LCR) and nucleic acid sequence based amplification (NASBA), can be used to detect malignant cells for diagnosis and monitoring of various malignancies. For example, reverse-transcriptase PCR (RT-PCR) is a powerful technique which can be used to detect the presence of a specific mRNA population in a complex mixture of thousands of other mRNA species. In RT-PCR, an mRNA species is first reverse transcribed to complementary DNA (cDNA) with use of the enzyme reverse transcriptase; the cDNA is then amplified as in a standard PCR reaction.

[0364] Hybridization to specific DNA molecules (e.g., oligonucleotides) arrayed on a solid support can be used to both detect the expression of and quantitate the level of expression of one or more CSNAs of interest. In this approach, all or a portion of one or more CSNAs is fixed to a substrate. A sample of interest, which may comprise RNA, e.g., total RNA or polyA-selected mRNA, or a complementary DNA (cDNA) copy of the RNA is incubated with the solid support under conditions in which hybridization will occur between the DNA on the solid support and the nucleic acid molecules in the sample of interest. Hybridization between the substrate-bound DNA and the nucleic acid molecules in the sample can be detected and quantitated by several means, including, without limitation, radioactive labeling or fluorescent labeling of the nucleic acid molecule or a secondary molecule designed to detect the hybrid.

[0365] The above tests can be carried out on samples derived from a variety of cells, bodily fluids and/or tissue extracts such as homogenates or solubilized tissue obtained from a patient. Tissue extracts are obtained routinely from tissue biopsy and autopsy material. Bodily fluids useful in the present invention include blood, urine, saliva or any other bodily secretion or derivative thereof. As used herein “blood” includes whole blood, plasma, serum, circulating epithelial cells, constituents, or any derivative of blood.

[0366] In addition to detection in bodily fluids, the proteins and nucleic acids of the invention are suitable to detection by cell capture technology. Whole cells may be captured by a variety methods for example magnetic separation, such as described in U.S. Pat. Nos. 5,200,084; 5,186,827; 5,108,933; and 4,925,788, the disclosures of which are incorporated herein by reference in their entireties. Epithelial cells may be captured using such products as Dynabeads® or CELLection™ (Dynal Biotech, Oslo, Norway). Alternatively, fractions of blood may be captured, e.g., the buffy coat fraction (50 mm cells isolated from 5 ml of blood) containing epithelial cells. In addition, cancer cells may be captured using the techniques described in WO 00/47998, the disclosure of which is incorporated herein by reference in its entirety. Once the cells are captured or concentrated, the proteins or nucleic acids are detected by the means described in the subject application. Alternatively, nucleic acids may be captured directly from blood samples, see U.S. Pat. Nos. 6,156,504, 5,501,963; or WO 01/42504, the disclosures of which are incorporated herein by reference in their entireties.

[0367] In a preferred embodiment, the specimen tested for expression of CSNA or CSP includes without limitation colon tissue, fecal samples, colonocytes, colon cells grown in cell culture, blood, serum, lymph node tissue, and lymphatic fluid. In another preferred embodiment, especially when metastasis of a primary colon cancer is known or suspected, specimens include, without limitation, tissues from brain, bone, bone marrow, liver, lungs, and adrenal glands. In general, the tissues may be sampled by biopsy, including, without limitation, needle biopsy, e.g., transthoracic needle aspiration, cervical mediatinoscopy, endoscopic lymph node biopsy, video-assisted thoracoscopy, exploratory thoracotomy, bone marrow biopsy and bone marrow aspiration.

[0368] Colonocytes represent an important source of the CSP or CSNA because they provide a picture of the immediate past metabolic history of the GI tract of a subject. In addition, such cells are representative of the cell population from a statistically large sampling frame reflecting the state of the colonic mucosa along the entire length of the colon in a non-invasive manner, in contrast to a limited sampling by colonic biopsy using an invasive procedure involving endoscopy. Specific examples of patents describing the isolation of colonocytes include U.S. Pat. Nos. 6,335,193; 6,020,137 5,741,650; 6,258,541; US 2001 0026925 A1; WO 00/63358 A1, the disclosures of which are incorporated herein by reference in their entireties.

[0369] All the methods of the present invention may optionally include determining the expression levels of one or more other cancer markers in addition to determining the expression level of a CSNA or CSP. In many cases, the use of another cancer marker will decrease the likelihood of false positives or false negatives. In one embodiment, the one or more other cancer markers include other CSNAs or CSPs as disclosed herein. Other cancer markers useful in the present invention will depend on the cancer being tested and are known to those of skill in the art. In a preferred embodiment, at least one other cancer marker in addition to a particular CSNA or CSP is measured. In a more preferred embodiment, at least two other additional cancer markers are used. In an even more preferred embodiment, at least three, more preferably at least five, even more preferably at least ten additional cancer markers are used.

[0370] Diagnosing

[0371] In one aspect, the invention provides a method for determining the expression levels and/or structural alterations of one or more CSNA and/or CSP in a sample from a patient suspected of having colon cancer. In general, the method comprises the steps of obtaining the sample from the patient, determining the expression level or structural alterations of a CSNA and/or CSP and then ascertaining whether the patient has colon cancer from the expression level of the CSNA or CSP. In general, if high expression relative to a control of a CSNA or CSP is indicative of colon cancer, a diagnostic assay is considered positive if the level of expression of the CSNA or CSP is at least one and a half times higher, and more preferably are at least two times higher, still more preferably five times higher, even more preferably at least ten times higher, than in preferably the same cells, tissues or bodily fluid of a normal human control. In contrast, if low expression relative to a control of a CSNA or CSP is indicative of colon cancer, a diagnostic assay is considered positive if the level of expression of the CSNA or CSP is at least one and a half times lower, and more preferably are at least two times lower, still more preferably five times lower, even more preferably at least ten times lower than in preferably the same cells, tissues or bodily fluid of a normal human control. The normal human control may be from a different patient or from uninvolved tissue of the same patient.

[0372] The present invention also provides a method of determining whether colon cancer has metastasized in a patient. One may identify whether the colon cancer has metastasized by measuring the expression levels and/or structural alterations of one or more CSNAs and/or CSPs in a variety of tissues. The presence of a CSNA or CSP in a tissue other than colon at levels higher than that of corresponding noncancerous tissue (e.g., the same tissue from another individual) is indicative of metastasis if high level expression of a CSNA or CSP is associated with colon cancer. Similarly, the presence of a CSNA or CSP in a tissue other than colon at levels lower than that of corresponding noncancerous tissue is indicative of metastasis if low level expression of a CSNA or CSP is associated with colon cancer. Further, the presence of a structurally altered CSNA or CSP that is associated with colon cancer is also indicative of metastasis.

[0373] In general, if high expression relative to a control of a CSNA or CSP is indicative of metastasis, an assay for metastasis is considered positive if the level of expression of the CSNA or CSP is at least one and a half times higher, and more preferably are at least two times higher, still more preferably five times higher, even more preferably at least ten times higher, than in preferably the same cells, tissues or bodily fluid of a normal human control. In contrast, if low expression relative to a control of a CSNA or CSP is indicative of metastasis, an assay for metastasis is considered positive if the level of expression of the CSNA or CSP is at least one and a half times lower, and more preferably are at least two times lower, still more preferably five times lower, even more preferably at least ten times lower than in preferably the same cells, tissues or bodily fluid of a normal human control.

[0374] Staging

[0375] The invention also provides a method of staging colon cancer in a human patient. The method comprises identifying a human patient having colon cancer and analyzing cells, tissues or bodily fluids from such human patient for expression levels and/or structural alterations of one or more CSNAs or CSPs. First, one or more tumors from a variety of patients are staged according to procedures well known in the art, and the expression levels of one or more CSNAs or CSPs is determined for each stage to obtain a standard expression level for each CSNA and CSP. Then, the CSNA or CSP expression levels of the CSNA or CSP are determined in a biological sample from a patient whose stage of cancer is not known. The CSNA or CSP expression levels from the patient are then compared to the standard expression level. By comparing the expression level of the CSNAs and CSPs from the patient to the standard expression levels, one may determine the stage of the tumor. The same procedure may be followed using structural alterations of a CSNA or CSP to determine the stage of a colon cancer.

[0376] Monitoring

[0377] Further provided is a method of monitoring colon cancer in a human patient. One may monitor a human patient to determine whether there has been metastasis and, if there has been, when metastasis began to occur. One may also monitor a human patient to determine whether a preneoplastic lesion has become cancerous. One may also monitor a human patient to determine whether a therapy, e.g., chemotherapy, radiotherapy or surgery, has decreased or eliminated the colon cancer. The monitoring may determine if there has been a reoccurrence and, if so, determine its nature. The method comprises identifying a human patient that one wants to monitor for colon cancer, periodically analyzing cells, tissues or bodily fluids from such human patient for expression levels of one or more CSNAs or CSPs, and comparing the CSNA or CSP levels over time to those CSNA or CSP expression levels obtained previously. Patients may also be monitored by measuring one or more structural alterations in a CSNA or CSP that are associated with colon cancer.

[0378] If increased expression of a CSNA or CSP is associated with metastasis, treatment failure, or conversion of a preneoplastic lesion to a cancerous lesion, then detecting an increase in the expression level of a CSNA or CSP indicates that the tumor is metastasizing, that treatment has failed or that the lesion is cancerous, respectively. One having ordinary skill in the art would recognize that if this were the case, then a decreased expression level would be indicative of no metastasis, effective therapy or failure to progress to a neoplastic lesion. If decreased expression of a CSNA or CSP is associated with metastasis, treatment failure, or conversion of a preneoplastic lesion to a cancerous lesion, then detecting a decrease in the expression level of a CSNA or CSP indicates that the tumor is metastasizing, that treatment has failed or that the lesion is cancerous, respectively. In a preferred embodiment, the levels of CSNAs or CSPs are determined from the same cell type, tissue or bodily fluid as prior patient samples. Monitoring a patient for onset of colon cancer metastasis is periodic and preferably is done on a quarterly basis, but may be done more or less frequently.

[0379] The methods described herein can further be utilized as prognostic assays to identify subjects having or at risk of developing a disease or disorder associated with increased or decreased expression levels of a CSNA and/or CSP. The present invention provides a method in which a test sample is obtained from a human patient and one or more CSNAs and/or CSPs are detected. The presence of higher (or lower) CSNA or CSP levels as compared to normal human controls is diagnostic for the human patient being at risk for developing cancer, particularly colon cancer. The effectiveness of therapeutic agents to decrease (or increase) expression or activity of one or more CSNAs and/or CSPs of the invention can also be monitored by analyzing levels of expression of the CSNAs and/or CSPs in a human patient in clinical trials or in in vitro screening assays such as in human cells. In this way, the gene expression pattern can serve as a marker, indicative of the physiological response of the human patient or cells, as the case may be, to the agent being tested.

[0380] Detection of Genetic Lesions or Mutations

[0381] The methods of the present invention can also be used to detect genetic lesions or mutations in a CSG, thereby determining if a human with the genetic lesion is susceptible to developing colon cancer or to determine what genetic lesions are responsible, or are partly responsible, for a person's existing colon cancer. Genetic lesions can be detected, for example, by ascertaining the existence of a deletion, insertion and/or substitution of one or more nucleotides from the CSGs of this invention, a chromosomal rearrangement of a CSG, an aberrant modification of a CSG (such as of the methylation pattern of the genomic DNA), or allelic loss of a CSG. Methods to detect such lesions in the CSG of this invention are known to those having ordinary skill in the art following the teachings of the specification.

Methods of Detecting Noncancerous Colon Diseases

[0382] The present invention also provides methods for determining the expression levels and/or structural alterations of one or more CSNAs and/or CSPs in a sample from a patient suspected of having or known to have a noncancerous colon disease. In general, the method comprises the steps of obtaining a sample from the patient, determining the expression level or structural alterations of a CSNA and/or CSP, comparing the expression level or structural alteration of the CSNA or CSP to a normal colon control, and then ascertaining whether the patient has a noncancerous colon disease. In general, if high expression relative to a control of a CSNA or CSP is indicative of a particular noncancerous colon disease, a diagnostic assay is considered positive if the level of expression of the CSNA or CSP is at least two times higher, and more preferably are at least five times higher, even more preferably at least ten times higher, than in preferably the same cells, tissues or bodily fluid of a normal human control. In contrast, if low expression relative to a control of a CSNA or CSP is indicative of a noncancerous colon disease, a diagnostic assay is considered positive if the level of expression of the CSNA or CSP is at least two times lower, more preferably are at least five times lower, even more preferably at least ten times lower than in preferably the same cells, tissues or bodily fluid of a normal human control. The normal human control may be from a different patient or from uninvolved tissue of the same patient.

[0383] One having ordinary skill in the art may determine whether a CSNA and/or CSP is associated with a particular noncancerous colon disease by obtaining colon tissue from a patient having a noncancerous colon disease of interest and determining which CSNAs and/or CSPs are expressed in the tissue at either a higher or a lower level than in normal colon tissue. In another embodiment, one may determine whether a CSNA or CSP exhibits structural alterations in a particular noncancerous colon disease state by obtaining colon tissue from a patient having a noncancerous colon disease of interest and determining the structural alterations in one or more CSNAs and/or CSPs relative to normal colon tissue.

Methods for Identifying Colon Tissue

[0384] In another aspect, the invention provides methods for identifying colon tissue. These methods are particularly useful in, e.g., forensic science, colon cell differentiation and development, and in tissue engineering.

[0385] In one embodiment, the invention provides a method for determining whether a sample is colon tissue or has colon tissue-like characteristics. The method comprises the steps of providing a sample suspected of comprising colon tissue or having colon tissue-like characteristics, determining whether the sample expresses one or more CSNAs and/or CSPs, and, if the sample expresses one or more CSNAs and/or CSPs, concluding that the sample comprises colon tissue. In a preferred embodiment, the CSNA encodes a polypeptide having an amino acid sequence selected from SEQ ID NO: 96-237, or a homolog, allelic variant or fragment thereof. In a more preferred embodiment, the CSNA has a nucleotide sequence selected from SEQ ID NO: 1-95, or a hybridizing nucleic acid, an allelic variant or a part thereof. Determining whether a sample expresses a CSNA can be accomplished by any method known in the art. Preferred methods include hybridization to microarrays, Northern blot hybridization, and quantitative or qualitative RT-PCR. In another preferred embodiment, the method can be practiced by determining whether a CSP is expressed. Determining whether a sample expresses a CSP can be accomplished by any method known in the art. Preferred methods include Western blot, ELISA, RIA and 2D PAGE. In one embodiment, the CSP has an amino acid sequence selected from SEQ ID NO: 96-237, or a homolog, allelic variant or fragment thereof. In another preferred embodiment, the expression of at least two CSNAs and/or CSPs is determined. In a more preferred embodiment, the expression of at least three, more preferably four and even more preferably five CSNAs and/or CSPs are determined.

[0386] In one embodiment, the method can be used to determine whether an unknown tissue is colon tissue. This is particularly useful in forensic science, in which small, damaged pieces of tissues that are not identifiable by microscopic or other means are recovered from a crime or accident scene. In another embodiment, the method can be used to determine whether a tissue is differentiating or developing into colon tissue. This is important in monitoring the effects of the addition of various agents to cell or tissue culture, e.g., in producing new colon tissue by tissue engineering. These agents include, e.g., growth and differentiation factors, extracellular matrix proteins and culture medium. Other factors that may be measured for effects on tissue development and differentiation include gene transfer into the cells or tissues, alterations in pH, aqueous:air interface and various other culture conditions.

Methods for Producing and Modifying Colon Tissue

[0387] In another aspect, the invention provides methods for producing engineered colon tissue or cells. In one embodiment, the method comprises the steps of providing cells, introducing a CSNA or a CSG into the cells, and growing the cells under conditions in which they exhibit one or more properties of colon tissue cells. In a preferred embodiment, the cells are pleuripotent. As is well known in the art, normal colon tissue comprises a large number of different cell types. Thus, in one embodiment, the engineered colon tissue or cells comprises one of these cell types. In another embodiment, the engineered colon tissue or cells comprises more than one colon cell type. Further, the culture conditions of the cells or tissue may require manipulation in order to achieve full differentiation and development of the colon cell tissue. Methods for manipulating culture conditions are well known in the art.

[0388] Nucleic acid molecules encoding one or more CSPs are introduced into cells, preferably pleuripotent cells. In a preferred embodiment, the nucleic acid molecules encode CSPs having amino acid sequences selected from SEQ ID NO: 96-237, or homologous proteins, analogs, allelic variants or fragments thereof. In a more preferred embodiment, the nucleic acid molecules have a nucleotide sequence selected from SEQ ID NO: 1-95, or hybridizing nucleic acids, allelic variants or parts thereof. In another highly preferred embodiment, a CSG is introduced into the cells. Expression vectors and methods of introducing nucleic acid molecules into cells are well known in the art and are described in detail, supra.

[0389] Artificial colon tissue may be used to treat patients who have lost some or all of their colon function.

Pharmaceutical Compositions

[0390] In another aspect, the invention provides pharmaceutical compositions comprising the nucleic acid molecules, polypeptides, fusion proteins, antibodies, antibody derivatives, antibody fragments, agonists, antagonists, or inhibitors of the present invention. In a preferred embodiment, the pharmaceutical composition comprises a CSNA or part thereof. In a more preferred embodiment, the CSNA has a nucleotide sequence selected from the group consisting of SEQ ID NO: 1-95, a nucleic acid that hybridizes thereto, an allelic variant thereof, or a nucleic acid that has substantial sequence identity thereto. In another preferred embodiment, the pharmaceutical composition comprises a CSP or fragment thereof. In a more preferred embodiment, the pharmaceutical composition comprises a CSP having an amino acid sequence that is selected from the group consisting of SEQ ID NO: 96-237, a polypeptide that is homologous thereto, a fusion protein comprising all or a portion of the polypeptide, or an analog or derivative thereof. In another preferred embodiment, the pharmaceutical composition comprises an anti-CSP antibody, preferably an antibody that specifically binds to a CSP having an amino acid that is selected from the group consisting of SEQ ID NO: 96-237, or an antibody that binds to a polypeptide that is homologous thereto, a fusion protein comprising all or a portion of the polypeptide, or an analog or derivative thereof.

[0391] Due to the association of angiogenesis with cancer vascularization there is great need of new markers and methods for diagnosing angiogenesis activity to identify developing tumors and angiogenesis related diseases. Furthermore, great need is also present for new molecular targets useful in the treatment of angiogenesis and angiogenesis related diseases such as cancer. In addition known modulators of angiogenesis such as endostatin or vascular endothelial growth factor (VEGF). Use of the methods and compositions disclosed herein in combination with anti-angiogenesis drugs, drugs that block the matrix breakdown (such as BMS-275291, Dalteparin (Fragmin®), Suramin), drugs that inhibit endothelial cells (2-methoxyestradiol (2-ME), CC-5013 (Thalidomide Analog), Combretastatin A4 Phosphate, LY317615 (Protein Kinase C Beta Inhibitor), Soy Isoflavone (Genistein; Soy Protein Isolate), Thalidomide), drugs that block activators of angiogenesis (AE-941 (Neovastat™; GW786034), Anti-VEGF Antibody (Bevacizumab; Avastin™), Interferon-alpha, PTK787/ZK 222584, VEGF-Trap, ZD6474), Drugs that inhibit endothelial-specific integrin/survival signaling (EMD 121974, Anti-Anb3 Integrin Antibody (Medi-522; Vitaxin™)).

[0392] Such a composition typically contains from about 0.1 to 90% by weight of a therapeutic agent of the invention formulated in and/or with a pharmaceutically acceptable carrier or excipient.

[0393] Pharmaceutical formulation is a well-established art that is further described in Gennaro (ed.), Remington: The Science and Practice of Pharmacy, 20^{th} ed., Lippincott, Williams & Wilkins (2000); Ansel et al., Pharmaceutical Dosage Forms and Drug Delivery Systems, 7^{th} ed., Lippincott Williams & Wilkins (1999); and Kibbe (ed.), Handbook of Pharmaceutical Excipients American Pharmaceutical Association, 3^{rd} ed. (2000) and thus need not be described in detail herein.

[0394] Briefly, formulation of the pharmaceutical compositions of the present invention will depend upon the route chosen for administration. The pharmaceutical compositions utilized in this invention can be administered by various routes including both enteral and parenteral routes, including oral, intravenous, intramuscular, subcutaneous, inhalation, topical, sublingual, rectal, intra-arterial, intramedullary, intrathecal, intraventricular, transmucosal, transdermal, intranasal, intraperitoneal, intrapulmonary, and intrauterine.

[0395] Oral dosage forms can be formulated as tablets, pills, dragees, capsules, liquids, gels, syrups, slurries, suspensions, and the like, for ingestion by the patient.

[0396] Solid formulations of the compositions for oral administration can contain suitable carriers or excipients, such as carbohydrate or protein fillers, such as sugars, including lactose, sucrose, mannitol, or sorbitol; starch from corn, wheat, rice, potato, or other plants; cellulose, such as methyl cellulose, hydroxypropylmethyl-cellulose, sodium carboxymethylcellulose, or microcrystalline cellulose; gums including arabic and tragacanth; proteins such as gelatin and collagen; inorganics, such as kaolin, calcium carbonate, dicalcium phosphate, sodium chloride; and other agents such as acacia and alginic acid.

[0397] Agents that facilitate disintegration and/or solubilization can be added, such as the cross-linked polyvinyl pyrrolidone, agar, alginic acid, or a salt thereof, such as sodium alginate, microcrystalline cellulose, cornstarch, sodium starch glycolate, and alginic acid.

[0398] Tablet binders that can be used include acacia, methylcellulose, sodium carboxymethylcellulose, polyvinylpyrrolidone (Povidone™), hydroxypropyl methylcellulose, sucrose, starch and ethylcellulose.

[0399] Lubricants that can be used include magnesium stearates, stearic acid, silicone fluid, talc, waxes, oils, and colloidal silica.

[0400] Fillers, agents that facilitate disintegration and/or solubilization, tablet binders and lubricants, including the aforementioned, can be used singly or in combination.

[0401] Solid oral dosage forms need not be uniform throughout. For example, dragee cores can be used in conjunction with suitable coatings, such as concentrated sugar solutions, which can also contain gum arabic, talc, polyvinylpyrrolidone, carbopol gel, polyethylene glycol, and/or titanium dioxide, lacquer solutions, and suitable organic solvents or solvent mixtures.

[0402] Oral dosage forms of the present invention include push-fit capsules made of gelatin, as well as soft, sealed capsules made of gelatin and a coating, such as glycerol or sorbitol. Push-fit capsules can contain active ingredients mixed with a filler or binders, such as lactose or starches, lubricants, such as talc or magnesium stearate, and, optionally, stabilizers. In soft capsules, the active compounds can be dissolved or suspended in suitable liquids, such as fatty oils, liquid, or liquid polyethylene glycol with or without stabilizers.

[0403] Additionally, dyestuffs or pigments can be added to the tablets or dragee coatings for product identification or to characterize the quantity of active compound, i.e., dosage.

[0404] Liquid formulations of the pharmaceutical compositions for oral (enteral) administration are prepared in water or other aqueous vehicles and can contain various suspending agents such as methylcellulose, alginates, tragacanth, pectin, kelgin, carrageenan, acacia, polyvinylpyrrolidone, and polyvinyl alcohol. The liquid formulations can also include solutions, emulsions, syrups and elixirs containing, together with the active compound(s), wetting agents, sweeteners, and coloring and flavoring agents.

[0405] The pharmaceutical compositions of the present invention can also be formulated for parenteral administration. Formulations for parenteral administration can be in the form of aqueous or non-aqueous isotonic sterile injection solutions or suspensions.

[0406] For intravenous injection, water soluble versions of the compounds of the present invention are formulated in, or if provided as a lyophilate, mixed with, a physiologically acceptable fluid vehicle, such as 5% dextrose (“D5”), physiologically buffered saline, 0.9% saline, Hanks' solution, or Ringer's solution. Intravenous formulations may include carriers, excipients or stabilizers including, without limitation, calcium, human serum albumin, citrate, acetate, calcium chloride, carbonate, and other salts.

[0407] Intramuscular preparations, e.g. a sterile formulation of a suitable soluble salt form of the compounds of the present invention, can be dissolved and administered in a pharmaceutical excipient such as Water-for-Injection, 0.9% saline, or 5% glucose solution. Alternatively, a suitable insoluble form of the compound can be prepared and administered as a suspension in an aqueous base or a pharmaceutically acceptable oil base, such as an ester of a long chain fatty acid (e.g., ethyl oleate), fatty oils such as sesame oil, triglycerides, or liposomes.

[0408] Parenteral formulations of the compositions can contain various carriers such as vegetable oils, dimethylacetamide, dimethylformamide, ethyl lactate, ethyl carbonate, isopropyl myristate, ethanol, polyols (glycerol, propylene glycol, liquid polyethylene glycol, and the like).

[0409] Aqueous injection suspensions can also contain substances that increase the viscosity of the suspension, such as sodium carboxymethyl cellulose, sorbitol, or dextran. Non-lipid polycationic amino polymers can also be used for delivery. Optionally, the suspension can also contain suitable stabilizers or agents that increase the solubility of the compounds to allow for the preparation of highly concentrated solutions.

[0410] Pharmaceutical compositions of the present invention can also be formulated to permit injectable, long-term, deposition. Injectable depot forms may be made by forming microencapsulated matrices of the compound in biodegradable polymers such as polylactide-polyglycolide. Depending upon the ratio of drug to polymer and the nature of the particular polymer employed, the rate of drug release can be controlled. Examples of other biodegradable polymers include poly(orthoesters) and poly(anhydrides). Depot injectable formulations are also prepared by entrapping the drug in microemulsions that are compatible with body tissues.

[0411] The pharmaceutical compositions of the present invention can be administered topically. For topical use the compounds of the present invention can also be prepared in suitable forms to be applied to the skin, or mucus membranes of the nose and throat, and can take the form of lotions, creams, ointments, liquid sprays or inhalants, drops, tinctures, lozenges, or throat paints. Such topical formulations further can include chemical compounds such as dimethylsulfoxide (DMSO) to facilitate surface penetration of the active ingredient. In other transdermal formulations, typically in patch-delivered formulations, the pharmaceutically active compound is formulated with one or more skin penetrants, such as 2-N-methyl-pyrrolidone (NMP) or Azone. A topical semi-solid ointment formulation typically contains a concentration of the active ingredient from about 1 to 20%, e.g., 5 to 10%, in a carrier such as a pharmaceutical cream base.

[0412] For application to the eyes or ears, the compounds of the present invention can be presented in liquid or semi-liquid form formulated in hydrophobic or hydrophilic bases as ointments, creams, lotions, paints or powders.

[0413] For rectal administration the compounds of the present invention can be administered in the form of suppositories admixed with conventional carriers such as cocoa butter, wax or other glyceride.

[0414] Inhalation formulations can also readily be formulated. For inhalation, various powder and liquid formulations can be prepared. For aerosol preparations, a sterile formulation of the compound or salt form of the compound may be used in inhalers, such as metered dose inhalers, and nebulizers. Aerosolized forms may be especially useful for treating respiratory disorders.

[0415] Alternatively, the compounds of the present invention can be in powder form for reconstitution in the appropriate pharmaceutically acceptable carrier at the time of delivery.

[0416] The pharmaceutically active compound in the pharmaceutical compositions of the present invention can be provided as the salt of a variety of acids, including but not limited to hydrochloric, sulfuric, acetic, lactic, tartaric, malic, and succinic acid. Salts tend to be more soluble in aqueous or other protonic solvents than are the corresponding free base forms.

[0417] After pharmaceutical compositions have been prepared, they are packaged in an appropriate container and labeled for treatment of an indicated condition.

[0418] The active compound will be present in an amount effective to achieve the intended purpose. The determination of an effective dose is well within the capability of those skilled in the art.

[0419] A “therapeutically effective dose” refers to that amount of active ingredient, for example CSP polypeptide, fusion protein, or fragments thereof, antibodies specific for CSP, agonists, antagonists or inhibitors of CSP, which ameliorates the signs or symptoms of the disease or prevent progression thereof; as would be understood in the medical arts, cure, although desired, is not required.

[0420] The therapeutically effective dose of the pharmaceutical agents of the present invention can be estimated initially by in vitro tests, such as cell culture assays, followed by assay in model animals, usually mice, rats, rabbits, dogs, or pigs. The animal model can also be used to determine an initial preferred concentration range and route of administration.

[0421] For example, the ED50 (the dose therapeutically effective in 50% of the population) and LD50 (the dose lethal to 50% of the population) can be determined in one or more cell culture of animal model systems. The dose ratio of toxic to therapeutic effects is the therapeutic index, which can be expressed as LD50/ED50. Pharmaceutical compositions that exhibit large therapeutic indices are preferred.

[0422] The data obtained from cell culture assays and animal studies are used in formulating an initial dosage range for human use, and preferably provide a range of circulating concentrations that includes the ED50 with little or no toxicity. After administration, or between successive administrations, the circulating concentration of active agent varies within this range depending upon pharmacokinetic factors well known in the art, such as the dosage form employed, sensitivity of the patient, and the route of administration.

[0423] The exact dosage will be determined by the practitioner, in light of factors specific to the subject requiring treatment. Factors that can be taken into account by the practitioner include the severity of the disease state, general health of the subject, age, weight, gender of the subject, diet, time and frequency of administration, drug combination(s), reaction sensitivities, and tolerance/response to therapy. Long-acting pharmaceutical compositions can be administered every 3 to 4 days, every week, or once every two weeks depending on half-life and clearance rate of the particular formulation.

[0424] Normal dosage amounts may vary from 0.1 to 100,000 micrograms, up to a total dose of about 1 g, depending upon the route of administration. Where the therapeutic agent is a protein or antibody of the present invention, the therapeutic protein or antibody agent typically is administered at a daily dosage of 0.01 mg to 30 mg/kg of body weight of the patient (e.g., 1 mg/kg to 5 mg/kg). The pharmaceutical formulation can be administered in multiple doses per day, if desired, to achieve the total desired daily dose.

[0425] Guidance as to particular dosages and methods of delivery is provided in the literature and generally available to practitioners in the art. Those skilled in the art will employ different formulations for nucleotides than for proteins or their inhibitors. Similarly, delivery of polynucleotides or polypeptides will be specific to particular cells, conditions, locations, etc.

[0426] Conventional methods, known to those of ordinary skill in the art of medicine, can be used to administer the pharmaceutical formulation(s) of the present invention to the patient. The pharmaceutical compositions of the present invention can be administered alone, or in combination with other therapeutic agents or interventions.

Therapeutic Methods

[0427] The present invention further provides methods of treating subjects having defects in a gene of the invention, e.g., in expression, activity, distribution, localization, and/or solubility, which can manifest as a disorder of colon function. As used herein, “treating” includes all medically-acceptable types of therapeutic intervention, including palliation and prophylaxis (prevention) of disease. The term “treating” encompasses any improvement of a disease, including minor improvements. These methods are discussed below.

[0428] Gene Therapy and Vaccines

[0429] The isolated nucleic acids of the present invention can also be used to drive in vivo expression of the polypeptides of the present invention. In vivo expression can be driven from a vector, typically a viral vector, often a vector based upon a replication incompetent retrovirus, an adenovirus, or an adeno-associated virus (AAV), for the purpose of gene therapy. In vivo expression can also be driven from signals endogenous to the nucleic acid or from a vector, often a plasmid vector, such as pVAX1 (Invitrogen, Carlsbad, Calif., USA), for purpose of “naked” nucleic acid vaccination, as further described in U.S. Pat. Nos. 5,589,466; 5,679,647; 5,804,566; 5,830,877; 5,843,913; 5,880,104; 5,958,891; 5,985,847; 6,017,897; 6,110,898; 6,204,250, the disclosures of which are incorporated herein by reference in their entireties. For cancer therapy, it is preferred that the vector also be tumor-selective. See, e.g., Doronin et al., J. Virol. 75: 3314-24 (2001).

[0430] In another embodiment of the therapeutic methods of the present invention, a therapeutically effective amount of a pharmaceutical composition comprising a nucleic acid molecule of the present invention is administered. The nucleic acid molecule can be delivered in a vector that drives expression of a CSP, fusion protein, or fragment thereof, or without such vector. Nucleic acid compositions that can drive expression of a CSP are administered, for example, to complement a deficiency in the native CSP, or as DNA vaccines. Expression vectors derived from virus, replication deficient retroviruses, adenovirus, adeno-associated (AAV) virus, herpes virus, or vaccinia virus can be used as can plasmids. See, e.g., Cid-Arregui, supra. In a preferred embodiment, the nucleic acid molecule encodes a CSP having the amino acid sequence of SEQ ID NO: 96-237, or a fragment, fusion protein, allelic variant or homolog thereof.

[0431] In still other therapeutic methods of the present invention, pharmaceutical compositions comprising host cells that express a CSP, fusions, or fragments thereof can be administered. In such cases, the cells are typically autologous, so as to circumvent xenogeneic or allotypic rejection, and are administered to complement defects in CSP production or activity. In a preferred embodiment, the nucleic acid molecules in the cells encode a CSP having the amino acid sequence of SEQ ID NO: 96-237, or a fragment, fusion protein, allelic variant or homolog thereof.

[0432] Antisense Administration

[0433] Antisense nucleic acid compositions, or vectors that drive expression of a CSG antisense nucleic acid, are administered to downregulate transcription and/or translation of a CSG in circumstances in which excessive production, or production of aberrant protein, is the pathophysiologic basis of disease.

[0434] Antisense compositions useful in therapy can have a sequence that is complementary to coding or to noncoding regions of a CSG. For example, oligonucleotides derived from the transcription initiation site, e.g., between positions −10 and +10 from the start site, are preferred.

[0435] Catalytic antisense compositions, such as ribozymes, that are capable of sequence-specific hybridization to CSG transcripts, are also useful in therapy. See, e.g., Phylactou, Adv. Drug Deliv. Rev. 44(2-3): 97-108 (2000); Phylactou et al., Hum. Mol. Genet. 7(10): 1649-53 (1998); Rossi, Ciba Found. Symp. 209: 195-204 (1997); and Sigurdsson et al., Trends Biotechnol. 13(8): 286-9 (1995).

[0436] Other nucleic acids useful in the therapeutic methods of the present invention are those that are capable of triplex helix formation in or near the CSG genomic locus. Such triplexing oligonucleotides are able to inhibit transcription. See, e.g., Intody et al., Nucleic Acids Res. 28(21): 4283-90 (2000); and McGuffie et al., Cancer Res. 60(14): 3790-9 (2000). Pharmaceutical compositions comprising such triplex forming oligos (TFOs) are administered in circumstances in which excessive production, or production of aberrant protein, is a pathophysiologic basis of disease.

[0437] In a preferred embodiment, the antisense molecule is derived from a nucleic acid molecule encoding a CSP, preferably a CSP comprising an amino acid sequence of SEQ ID NO: 96-237, or a fragment, allelic variant or homolog thereof. In a more preferred embodiment, the antisense molecule is derived from a nucleic acid molecule having a nucleotide sequence of SEQ ID NO: 1-95, or a part, allelic variant, substantially similar or hybridizing nucleic acid thereof.

[0438] Polypeptide Administration

[0439] In one embodiment of the therapeutic methods of the present invention, a therapeutically effective amount of a pharmaceutical composition comprising a CSP, a fusion protein, fragment, analog or derivative thereof is administered to a subject with a clinically-significant CSP defect.

[0440] Protein compositions are administered, for example, to complement a deficiency in native CSP. In other embodiments, protein compositions are administered as a vaccine to elicit a humoral and/or cellular immune response to CSP. The immune response can be used to modulate activity of CSP or, depending on the immunogen, to immunize against aberrant or aberrantly expressed forms, such as mutant or inappropriately expressed isoforms. In yet other embodiments, protein fusions having a toxic moiety are administered to ablate cells that aberrantly accumulate CSP.

[0441] In a preferred embodiment, the polypeptide administered is a CSP comprising an amino acid sequence of SEQ ID NO: 96-237, or a fusion protein, allelic variant, homolog, analog or derivative thereof. In a more preferred embodiment, the polypeptide is encoded by a nucleic acid molecule having a nucleotide sequence of SEQ ID NO: 1-95, or a part, allelic variant, substantially similar or hybridizing nucleic acid thereof.

[0442] Antibody, Agonist and Antagonist Administration

[0443] In another embodiment of the therapeutic methods of the present invention, a therapeutically effective amount of a pharmaceutical composition comprising an antibody (including fragment or derivative thereof) of the present invention is administered. As is well known, antibody compositions are administered, for example, to antagonize activity of CSP, or to target therapeutic agents to sites of CSP presence and/or accumulation. In a preferred embodiment, the antibody specifically binds to a CSP comprising an amino acid sequence of SEQ ID NO: 96-237, or a fusion protein, allelic variant, homolog, analog or derivative thereof. In a more preferred embodiment, the antibody specifically binds to a CSP encoded by a nucleic acid molecule having a nucleotide sequence of SEQ ID NO: 1-95, or a part, allelic variant, substantially similar or hybridizing nucleic acid thereof.

[0444] The present invention also provides methods for identifying modulators which bind to a CSP or have a modulatory effect on the expression or activity of a CSP. Modulators which decrease the expression or activity of CSP (antagonists) are believed to be useful in treating colon cancer. Such screening assays are known to those of skill in the art and include, without limitation, cell-based assays and cell-free assays. Small-molecules predicted via computer imaging to specifically bind to regions of a CSP can also be designed, synthesized and tested for use in the imaging and treatment of colon cancer. Further, libraries of molecules can be screened for potential anticancer agents by assessing the ability of the molecule to bind to the CSPs identified herein. Molecules identified in the library as being capable of binding to a CSP are key candidates for further evaluation for use in the treatment of colon cancer. In a preferred embodiment, these molecules will downregulate expression and/or activity of a CSP in cells.

[0445] In another embodiment of the therapeutic methods of the present invention, a pharmaceutical composition comprising a non-antibody antagonist of CSP is administered. Antagonists of CSP can be produced using methods generally known in the art. In particular, purified CSP can be used to screen libraries of pharmaceutical agents, often combinatorial libraries of small molecules, to identify those that specifically bind and antagonize at least one activity of a CSP.

[0446] In other embodiments a pharmaceutical composition comprising an agonist of a CSP is administered. Agonists can be identified using methods analogous to those used to identify antagonists.

[0447] In a preferred embodiment, the antagonist or agonist specifically binds to and antagonizes or agonizes, respectively, a CSP comprising an amino acid sequence of SEQ ID NO: 96-237, or a fusion protein, allelic variant, homolog, analog or derivative thereof. In a more preferred embodiment, the antagonist or agonist specifically binds to and antagonizes or agonizes, respectively, a CSP encoded by a nucleic acid molecule having a nucleotide sequence of SEQ ID NO: 1-95, or a part, allelic variant, substantially similar or hybridizing nucleic acid thereof.

[0448] Targeting Colon Tissue

[0449] The invention also provides a method in which a polypeptide of the invention, or an antibody thereto, is linked to a therapeutic agent such that it can be delivered to the colon or to specific cells in the colon. In a preferred embodiment, an anti-CSP antibody is linked to a therapeutic agent and is administered to a patient in need of such therapeutic agent. The therapeutic agent may be a toxin, if colon tissue needs to be selectively destroyed. This would be useful for targeting and killing colon cancer cells. In another embodiment, the therapeutic agent may be a growth or differentiation factor, which would be useful for promoting colon cell function.

[0450] In another embodiment, an anti-CSP antibody may be linked to an imaging agent that can be detected using, e.g., magnetic resonance imaging, CT or PET. This would be useful for determining and monitoring colon function, identifying colon cancer tumors, and identifying noncancerous colon diseases.

### EXAMPLES

### Example 1a

### Alternative Splice Variants

[0451] We identified gene transcripts using the Gencarta™ tools (Compugen Ltd., Tel Aviv, Israel) and a variety of public and proprietary databases. These splice variants are either sequences which differ from a previously defined sequence or new uses of known sequences. In general related variants are annotated as DEX0448_XXX.nt.1, DEX0448_XXX.nt.2, DEX0448_XXX.nt.3, etc. The variant DNA sequences encode proteins which differ from a previously defined protein sequence. In relation to the nucleotide sequence naming convention, protein variants are annotated as DEX0448_XXX.aa.1, DEX0448_XXX.aa.2, etc., wherein transcript DEX0448_XXX.nt.1 encodes protein DEX0448_XXX.aa.1. A single transcript may encode a protein from an alternate Open Reading Fram (ORF) which is designated DEX0448_XXX.orf.1. Additionally, multiple transcripts may encode for a single protein. In this case, DEX0448_XXX.nt.1 and DEX0448_XXX.nt.2 will both be associated with DEX0448_XXX.aa.1.

[0452] The mapping of the nucleic acid (“NT”) SEQ ID NO; DEX ID; chromosomal location (if known); open reading frame (ORF) location; amino acid (“AA”) SEQ ID NO; AA DEX ID; are shown in the table below.

| SEQ | | | | SEQ | |
|---|---|---|---|---|---|
| ID | | | | ID | |
| NO | DEX ID | Chromo Map | ORF Loc | NO | DEX ID |
| 1 | DEX0448_001.nt.1 | 6p12.2 | 1-547 | 96 | DEX0448_001.aa.1 |
| 1 | DEX0448_001.nt.1 | 6p12.2 | 212-538 | 97 | DEX0448_001.orf.1 |
| 2 | DEX0448_002.nt.1 | X; 22899334-22902697 | 1-323 | 98 | DEX0448_002.aa.1 |
| 2 | DEX0448_002.nt.1 | X; 22899334-22902697 | 86-310 | 99 | DEX0448_002.orf.1 |
| 3 | DEX0448_003.nt.1 | 8p23.1 | 250-924 | 100 | DEX0448_003.aa.1 |
| 3 | DEX0448_003.nt.1 | 8p23.1 | 3-545 | 101 | DEX0448_003.orf.1 |
| 4 | DEX0448_004.nt.1 | 19q13.2 | 1-686 | 102 | DEX0448_004.aa.1 |
| 4 | DEX0448_004.nt.1 | 19q13.2 | 1-666 | 103 | DEX0448_004.orf.1 |
| 5 | DEX0448_005.nt.1 | 7q32.3 | 206-431 | 104 | DEX0448_005.aa.1 |
| 5 | DEX0448_005.nt.1 | 7q32.3 | 173-427 | 105 | DEX0448_005.orf.1 |
| 6 | DEX0448_005.nt.2 | 7q32.3 | 206-431 | 104 | DEX0448_005.aa.1 |
| 6 | DEX0448_005.nt.2 | 7q32.3 | 173-427 | 106 | DEX0448_005.orf.2 |
| 7 | DEX0448_006.nt.1 | 1q32.2 | 1-200 | 107 | DEX0448_006.aa.1 |
| 7 | DEX0448_006.nt.1 | 1q32.2 | 3-200 | 108 | DEX0448_006.orf.1 |
| 8 | DEX0448_007.nt.1 | 1q22 | 61-443 | 109 | DEX0448_007.aa.1 |
| 8 | DEX0448_007.nt.1 | 1q22 | 3-353 | 110 | DEX0448_007.orf.1 |
| 9 | DEX0448_008.nt.1 | 21q22.2 | 172-676 | 111 | DEX0448_008.aa.1 |
| 9 | DEX0448_008.nt.1 | 21q22.2 | 2-676 | 112 | DEX0448_008.orf.1 |
| 10 | DEX0448_009.nt.1 | 17q23.3 | 3-527 | 113 | DEX0448_009.aa.1 |
| 11 | DEX0448_010.nt.1 | 5q32 | 60-869 | 114 | DEX0448_010.aa.1 |
| 12 | DEX0448_011.nt.1 | 17q21.32 | 1-673 | 115 | DEX0448_011.aa.1 |
| 12 | DEX0448_011.nt.1 | 17q21.32 | 311-673 | 116 | DEX0448_011.orf.1 |
| 13 | DEX0448_012.nt.1 | 1p13.3 | 6-207 | 117 | DEX0448_012.aa.1 |
| 13 | DEX0448_012.nt.1 | 1p13.3 | 18-260 | 118 | DEX0448_012.orf.1 |
| 14 | DEX0448_013.nt.1 | 11q24.2 | 157-911 | 119 | DEX0448_013.aa.1 |
| 14 | DEX0448_013.nt.1 | 11q24.2 | 279-887 | 120 | DEX0448_013.orf.1 |
| 15 | DEX0448_014.nt.1 | 11q13.4 | 49-431 | 121 | DEX0448_014.aa.1 |
| 15 | DEX0448_014.nt.1 | 11q13.4 | 3-431 | 122 | DEX0448_014.orf.1 |
| 16 | DEX0448_015.nt.1 | 11q13.4 | 1-230 | 123 | DEX0448_015.aa.1 |
| 16 | DEX0448_015.nt.1 | 11q13.4 | 232-561 | 124 | DEX0448_015.orf.1 |
| 17 | DEX0448_016.nt.1 | 15q25.3 | 4-595 | 125 | DEX0448_016.aa.1 |
| 18 | DEX0448_016.nt.2 | 15q25.3 | 209-833 | 126 | DEX0448_016.aa.2 |
| 18 | DEX0448_016.nt.2 | 15q25.3 | 290-829 | 127 | DEX0448_016.orf.2 |
| 19 | DEX0448_016.nt.3 | 15q25.3 | 54-503 | 128 | DEX0448_016.aa.3 |
| 20 | DEX0448_017.nt.1 | 8q24.3 | 1-898 | 129 | DEX0448_017.aa.1 |
| 20 | DEX0448_017.nt.1 | 8q24.3 | 80-892 | 130 | DEX0448_017.orf.1 |
| 21 | DEX0448_018.nt.1 | 6p21.1 | 133-1745 | 131 | DEX0448_018.aa.1 |
| 21 | DEX0448_018.nt.1 | 6p21.1 | 842-1411 | 132 | DEX0448_018.orf.1 |
| 22 | DEX0448_019.nt.1 | 16q23.1 | 46-378 | 133 | DEX0448_019.aa.1 |
| 23 | DEX0448_020.nt.1 | 3q27.2 | 1-783 | 134 | DEX0448_020.aa.1 |
| 24 | DEX0448_021.nt.1 | 11p15.5 | 353-1435 | 135 | DEX0448_021.aa.1 |
| 25 | DEX0448_021.nt.2 | 11p15.5 | 353-1339 | 136 | DEX0448_021.aa.2 |
| 26 | DEX0448_021.nt.3 | 11p15.5 | 1-492 | 137 | DEX0448_021.aa.3 |
| 27 | DEX0448_022.nt.1 | 6_DR51; 3849138-3852035 | 2-203 | 138 | DEX0448_022.aa.1 |
| 27 | DEX0448_022.nt.1 | 6_DR51; 3849138-3852035 | 214-618 | 139 | DEX0448_022.orf.1 |
| 28 | DEX0448_022.nt.2 | 6_DR51; 3849138-3851915 | 149-497 | 140 | DEX0448_022.aa.2 |
| 28 | DEX0448_022.nt.2 | 6_DR51; 3849138-3851915 | 109-513 | 141 | DEX0448_022.orf.2 |
| 29 | DEX0448_023.nt.1 | 19q13.2 | 115-777 | 142 | DEX0448_023.aa.1 |
| 29 | DEX0448_023.nt.1 | 19q13.2 | 22-882 | 143 | DEX0448_023.orf.1 |
| 30 | DEX0448_023.nt.2 | 19q13.2 | 387-831 | 144 | DEX0448_023.aa.2 |
| 30 | DEX0448_023.nt.2 | 19q13.2 | 1337-1786 | 145 | DEX0448_023.orf.2 |
| 31 | DEX0448_023.nt.3 | 10q26.3 | 750-3186 | 146 | DEX0448_023.aa.3 |
| 31 | DEX0448_023.nt.3 | 10q26.3 | 742-2067 | 147 | DEX0448_023.orf.3 |
| 32 | DEX0448_024.nt.1 | 19p13.12 | 37-1091 | 148 | DEX0448_024.aa.1 |
| 32 | DEX0448_024.nt.1 | 19p13.12 | 1-669 | 149 | DEX0448_024.orf.1 |
| 33 | DEX0448_025.nt.1 | 11p15.5 | 1-783 | 150 | DEX0448_025.aa.1 |
| 33 | DEX0448_025.nt.1 | 11p15.5 | 3-779 | 151 | DEX0448_025.orf.1 |
| 34 | DEX0448_026.nt.1 | 19q13.2 | 179-2128 | 152 | DEX0448_026.aa.1 |
| 35 | DEX0448_026.nt.2 | 19q13.2 | 341-1504 | 153 | DEX0448_026.aa.2 |
| 36 | DEX0448_027.nt.1 | 3p26.1 | 2590-2842 | 154 | DEX0448_027.aa.1 |
| 36 | DEX0448_027.nt.1 | 3p26.1 | 3377-4513 | 155 | DEX0448_027.orf.1 |
| 37 | DEX0448_027.nt.2 | 3p26.1 | 2590-2842 | 154 | DEX0448_027.aa.1 |
| 37 | DEX0448_027.nt.2 | 3p26.1 | 3245-4381 | 156 | DEX0448_027.orf.2 |
| 38 | DEX0448_027.nt.3 | 3p26.1 | 2590-3667 | 157 | DEX0448_027.aa.3 |
| 38 | DEX0448_027.nt.3 | 3p26.1 | 2677-3663 | 158 | DEX0448_027.orf.3 |
| 39 | DEX0448_027.nt.4 | 3p26.1 | 2590-2842 | 154 | DEX0448_027.aa.1 |
| 39 | DEX0448_027.nt.4 | 3p26.1 | 2970-4244 | 159 | DEX0448_027.orf.4 |
| 40 | DEX0448_027.nt.5 | 3p26.1 | 2590-2842 | 154 | DEX0448_027.aa.1 |
| 40 | DEX0448_027.nt.5 | 3p26.1 | 2970-4244 | 160 | DEX0448_027.orf.5 |
| 41 | DEX0448_027.nt.6 | 3p26.1 | 1-195 | 161 | DEX0448_027.aa.6 |
| 41 | DEX0448_027.nt.6 | 3p26.1 | 354-686 | 162 | DEX0448_027.orf.6 |
| 42 | DEX0448_028.nt.1 | 6p21.32 | 436-874 | 163 | DEX0448_028.aa.1 |
| 42 | DEX0448_028.nt.1 | 6p21.32 | 61-870 | 164 | DEX0448_028.orf.1 |
| 43 | DEX0448_028.nt.2 | 6p21.32 | 186-624 | 163 | DEX0448_028.aa.1 |
| 43 | DEX0448_028.nt.2 | 6p21.32 | 80-619 | 165 | DEX0448_028.orf.2 |
| 44 | DEX0448_029.nt.1 | 19q13.33 | 101-2488 | 166 | DEX0448_029.aa.1 |
| 45 | DEX0448_029.nt.2 | 19q13.33 | 163-2043 | 167 | DEX0448_029.aa.2 |
| 46 | DEX0448_029.nt.3 | 19q13.33 | 166-2046 | 168 | DEX0448_029.aa.3 |
| 47 | DEX0448_029.nt.4 | 19q13.33 | 166-1614 | 169 | DEX0448_029.aa.4 |
| 48 | DEX0448_029.nt.5 | 19q13.33 | 38-1852 | 170 | DEX0448_029.aa.5 |
| 49 | DEX0448_029.nt.6 | 19q13.33 | 38-1522 | 171 | DEX0448_029.aa.6 |
| 50 | DEX0448_029.nt.7 | 19q13.33 | 26-1633 | 172 | DEX0448_029.orf.7 |
| 50 | DEX0448_029.nt.7 | 19q13.33 | 1-1635 | 173 | DEX0448_029.aa.7 |
| 51 | DEX0448_030.nt.1 | 1q25.3 | 2-1447 | 174 | DEX0448_030.orf.1 |
| 51 | DEX0448_030.nt.1 | 1q25.3 | 91-1455 | 175 | DEX0448_030.aa.1 |
| 52 | DEX0448_031.nt.1 | 1q24.2 | 324-1343 | 176 | DEX0448_031.aa.1 |
| 53 | DEX0448_032.nt.1 | 8q24.3 | 46-957 | 177 | DEX0448_032.orf.1 |
| 53 | DEX0448_032.nt.1 | 8q24.3 | 380-938 | 178 | DEX0448_032.aa.1 |
| 54 | DEX0448_033.nt.1 | 18p11.32 | 3-1454 | 179 | DEX0448_033.orf.1 |
| 54 | DEX0448_033.nt.1 | 18p11.32 | 3-1455 | 180 | DEX0448_033.aa.1 |
| 55 | DEX0448_033.nt.2 | 18p11.32 | 3-1454 | 181 | DEX0448_033.orf.2 |
| 55 | DEX0448_033.nt.2 | 18p11.32 | 3-1455 | 180 | DEX0448_033.aa.1 |
| 56 | DEX0448_033.nt.3 | 18p11.32 | 3-1454 | 182 | DEX0448_033.orf.3 |
| 56 | DEX0448_033.nt.3 | 18p11.32 | 3-1455 | 180 | DEX0448_033.aa.1 |
| 57 | DEX0448_033.nt.4 | 18p11.32 | 1199-1945 | 183 | DEX0448_033.orf.4 |
| 57 | DEX0448_033.nt.4 | 18p11.32 | 3-669 | 184 | DEX0448_033.aa.4 |
| 58 | DEX0448_033.nt.5 | 18p11.32 | 3-1250 | 185 | DEX0448_033.orf.5 |
| 58 | DEX0448_033.nt.5 | 18p11.32 | 3-1251 | 186 | DEX0448_033.aa.5 |
| 59 | DEX0448_033.nt.6 | 18p11.32 | 3-1454 | 187 | DEX0448_033.orf.6 |
| 59 | DEX0448_033.nt.6 | 18p11.32 | 3-1455 | 180 | DEX0448_033.aa.1 |
| 60 | DEX0448_033.nt.7 | 18p11.32 | 3-1049 | 188 | DEX0448_033.orf.7 |
| 60 | DEX0448_033.nt.7 | 18p11.32 | 134-1052 | 189 | DEX0448_033.aa.7 |
| 61 | DEX0448_033.nt.8 | 18p11.32 | 3-1454 | 190 | DEX0448_033.orf.8 |
| 61 | DEX0448_033.nt.8 | 18p11.32 | 3-1455 | 180 | DEX0448_033.aa.1 |
| 62 | DEX0448_033.nt.9 | 18p11.32 | 3-1454 | 191 | DEX0448_033.orf.9 |
| 62 | DEX0448_033.nt.9 | 18p11.32 | 3-1455 | 180 | DEX0448_033.aa.1 |
| 63 | DEX0448_033.nt.10 | 18p11.32 | 3-1454 | 192 | DEX0448_033.orf.10 |
| 63 | DEX0448_033.nt.10 | 18p11.32 | 3-1455 | 180 | DEX0448_033.aa.1 |
| 64 | DEX0448_034.nt.1 | 15q25.3 | 1-417 | 193 | DEX0448_034.aa.1 |
| 65 | DEX0448_035.nt.1 | 1q42.3 | 61-1218 | 194 | DEX0448_035.aa.1 |
| 66 | DEX0448_035.nt.2 | 1q42.3 | 61-1221 | 194 | DEX0448_035.aa.1 |
| 67 | DEX0448_035.nt.3 | 1q42.3 | 61-1221 | 194 | DEX0448_035.aa.1 |
| 68 | DEX0448_035.nt.4 | 1q42.3 | 61-1536 | 195 | DEX0448_035.aa.4 |
| 69 | DEX0448_036.nt.1 | 4p16.3 | 407-1480 | 196 | DEX0448_036.aa.1 |
| 70 | DEX0448_036.nt.2 | 4p16.3 | 167-1262 | 197 | DEX0448_036.aa.2 |
| 70 | DEX0448_036.nt.2 | 4p16.3 | 466-1041 | 198 | DEX0448_036.orf.2 |
| 71 | DEX0448_036.nt.3 | 4p16.3 | 31-569 | 199 | DEX0448_036.aa.3 |
| 71 | DEX0448_036.nt.3 | 4p16.3 | 76-561 | 200 | DEX0448_036.orf.3 |
| 72 | DEX0448_037.nt.1 | 11p15.5 | 3-818 | 201 | DEX0448_037.aa.1 |
| 73 | DEX0448_037.nt.2 | 11p15.5 | 3-911 | 202 | DEX0448_037.aa.2 |
| 74 | DEX0448_037.nt.3 | 11p15.5 | 494-1757 | 203 | DEX0448_037.aa.3 |
| 74 | DEX0448_037.nt.3 | 11p15.5 | 1016-1756 | 204 | DEX0448_037.orf.3 |
| 75 | DEX0448_037.nt.4 | 11p15.5 | 240-947 | 205 | DEX0448_037.aa.4 |
| 76 | DEX0448_037.nt.5 | 11p15.5 | 240-1007 | 206 | DEX0448_037.aa.5 |
| 77 | DEX0448_037.nt.6 | 11p15.5 | 240-869 | 207 | DEX0448_037.aa.6 |
| 78 | DEX0448_038.nt.1 | 18p11.32 | 1-179 | 208 | DEX0448_038.aa.1 |
| 78 | DEX0448_038.nt.1 | 18p11.32 | 22-294 | 209 | DEX0448_038.orf.1 |
| 79 | DEX0448_039.nt.1 | 11q11 | 620-877 | 210 | DEX0448_039.aa.1 |
| 80 | DEX0448_040.nt.1 | 16p13.3 | 1-325 | 211 | DEX0448_040.aa.1 |
| 80 | DEX0448_040.nt.1 | 16p13.3 | 52-321 | 212 | DEX0448_040.orf.1 |
| 81 | DEX0448_040.nt.2 | 16p13.3 | 43-625 | 213 | DEX0448_040.aa.2 |
| 81 | DEX0448_040.nt.2 | 16p13.3 | 51-617 | 214 | DEX0448_040.orf.2 |
| 82 | DEX0448_040.nt.3 | 16p13.3 | 22-630 | 215 | DEX0448_040.aa.3 |
| 82 | DEX0448_040.nt.3 | 16p13.3 | 3-626 | 216 | DEX0448_040.orf.3 |
| 83 | DEX0448_040.nt.4 | 16p13.3 | 1-567 | 217 | DEX0448_040.aa.4 |
| 84 | DEX0448_040.nt.5 | 16p13.3 | 1-517 | 218 | DEX0448_040.aa.5 |
| 84 | DEX0448_040.nt.5 | 16p13.3 | 1-513 | 219 | DEX0448_040.orf.5 |
| 85 | DEX0448_040.nt.6 | 16p13.3 | 1352-1823 | 220 | DEX0448_040.aa.6 |
| 85 | DEX0448_040.nt.6 | 16p13.3 | 1347-1814 | 221 | DEX0448_040.orf.6 |
| 86 | DEX0448_040.nt.7 | 16p13.3 | 34-265 | 222 | DEX0448_040.aa.7 |
| 86 | DEX0448_040.nt.7 | 16p13.3 | 504-920 | 223 | DEX0448_040.orf.7 |
| 87 | DEX0448_041.nt.1 | 2q37.1 | 151-1854 | 224 | DEX0448_041.aa.1 |
| 88 | DEX0448_041.nt.2 | 2q37.1 | 151-1710 | 225 | DEX0448_041.aa.2 |
| 89 | DEX0448_042.nt.1 | 2q33.1 | 188-1765 | 226 | DEX0448_042.aa.1 |
| 90 | DEX0448_043.nt.1 | 15q22.31 | 1-366 | 227 | DEX0448_043.aa.1 |
| 90 | DEX0448_043.nt.1 | 15q22.31 | 154-366 | 228 | DEX0448_043.orf.1 |
| 91 | DEX0448_043.nt.2 | 15q22.31 | 1-730 | 229 | DEX0448_043.aa.2 |
| 91 | DEX0448_043.nt.2 | 15q22.31 | 24-1049 | 230 | DEX0448_043.orf.2 |
| 92 | DEX0448_044.nt.1 | 20q13.33 | 1-219 | 231 | DEX0448_044.aa.1 |
| 92 | DEX0448_044.nt.1 | 20q13.33 | 48-356 | 232 | DEX0448_044.orf.1 |
| 93 | DEX0448_044.nt.2 | 20q13.33 | 1-219 | 231 | DEX0448_044.aa.1 |
| 93 | DEX0448_044.nt.2 | 20q13.33 | 48-383 | 233 | DEX0448_044.orf.2 |
| 94 | DEX0448_044.nt.3 | 20q13.33 | 1-265 | 234 | DEX0448_044.aa.3 |
| 94 | DEX0448_044.nt.3 | 20q13.33 | 2-259 | 235 | DEX0448_044.orf.3 |
| 95 | DEX0448_044.nt.4 | 20q13.33 | 31-265 | 236 | DEX0448_044.aa.4 |
| 95 | DEX0448_044.nt.4 | 20q13.33 | 3-260 | 237 | DEX0448_044.orf.4 |

[0453] The polypeptides of the present invention were analyzed and the following attributes were identified; specifically, epitopes, post translational modifications, signal peptides and transmembrane domains. Antigenicity (Epitope) prediction was performed through the antigenic module in the EMBOSS package. Rice, P., EMBOSS: The European Molecular Biology Open Software Suite, Trends in Genetics 16(6): 276-277 (2000). The antigenic module predicts potentially antigenic regions of a protein sequence, using the method of Kolaskar and Tongaonkar. Kolaskar, A S and Tongaonkar, P C., A semi-empirical method for prediction of antigenic determinants on protein antigens, FEBS Letters 276: 172-174 (1990). Examples of post-translational modifications (PTMs) and other motifs of the CSPs of this invention are listed below. In addition, antibodies that specifically bind such post-translational modifications may be useful as a diagnostic or as therapeutic. The PTMs and other motifs were predicted by using the ProSite Dictionary of Proteins Sites and Patterns (Bairoch et al., Nucleic Acids Res. 25(1):217-221 (1997)), the following motifs, including PTMs, were predicted for the CSPs of the invention. The signal peptides were detected by using the SignalP 2.0, see Nielsen et al., Protein Engineering 12, 3-9 (1999). Prediction of transmembrane helices in proteins was performed by the application TMHMM 2.0, “currently the best performing transmembrane prediction program”, according to authors (Krogh et al., Journal of Molecular Biology, 305(3):567-580, (2001); Moller et al., Bioinformatics, 17(7):646-653, (2001); Sonnhammer, et al., A hidden Markov model for predicting transmembrane helices in protein sequences in Glasgow, et al. Ed. Proceedings of the Sixth International Conference on Intelligent Systems for Molecular Biology. pages 175-182, Menlo Park, Calif., 1998. AAAI Press. The PSORT II program may also be used to predict cellular localizations. Horton et al., Intelligent Systems for Molecular Biology 5: 147-152 (1997). The table below includes the following sequence annotations: Signal peptide presence; TM (number of membrane domain, topology in orientation and position); Amino acid location and antigenic index (location, AI score); PTM and other motifs (type, amino acid residue locations); and functional domains (type, amino acid residue locations).

| DEX ID | Sig P | TMHMM | Antigenicity | PTM | Domains |
|---|---|---|---|---|---|
| DEX0448_001.aa.1 | N | 0 - o1-185; | | CK2_PHOSPHO_SITE 157-160; | |
| | | | | CAMP_PHOSPHO_SITE 135-138; | |
| | | | | PKC_PHOSPHO_SITE 104-106; | |
| | | | | ASN_GLYCOSYLATION 35-38; PKC_PHOSPHO_SITE | |
| | | | | 178-180; CAMP_PHOSPHO_SITE 101-104; | |
| | | | | PKC_PHOSPHO_SITE 166-168; PKC_PHOSPHO_SITE | |
| | | | | 70-72; CK2_PHOSPHO_SITE 155-158; | |
| | | | | CK2_PHOSPHO_SITE 104-107; PKC_PHOSPHO_SITE | |
| | | | | 94-96; CK2_PHOSPHO_SITE 70-73; | |
| | | | | PKC_PHOSPHO_SITE 124-126; | |
| DEX0448_001.orf.1 | N | 0 - o1-109; | | PKC_PHOSPHO_SITE 56-58; PKC_PHOSPHO_SITE | |
| | | | | 83-85; MYRISTYL 40-45; CAMP_PHOSPHO_SITE | |
| | | | | 95-98; CAMP_PHOSPHO_SITE 35-38; | |
| | | | | PKC_PHOSPHO_SITE 44-46; MYRISTYL 56-61; | |
| | | | | PKC_PHOSPHO_SITE 30-32; PKC_PHOSPHO_SITE | |
| | | | | 57-59; AMIDATION 10-13; PKC_PHOSPHO_SITE | |
| | | | | 11-13; MYRISTYL 26-31; PKC_PHOSPHO_SITE | |
| | | | | 98-100; AMIDATION 56-59; CK2_PHOSPHO_SITE | |
| | | | | 22-25; CAMP_PHOSPHO_SITE 106-109; | |
| | | | | CAMP_PHOSPHO_SITE 36-39; PKC_PHOSPHO_SITE | |
| | | | | 27-29; CAMP_PHOSPHO_SITE 53-56; | |
| | | | | PKC_PHOSPHO_SITE 22-24; CK2_PHOSPHO_SITE | |
| | | | | 38-41; | |
| DEX0448_002.aa.1 | N | 0 - o1-106; | 79-91, 1.14; 37-43, | PKC_PHOSPHO_SITE 81-83; CK2_PHOSPHO_SITE | |
| | | | 1.089; 69-77, | 77-80; CK2_PHOSPHO_SITE 68-71; | |
| | | | 1.12; 17-29, | PKC_PHOSPHO_SITE 91-93; | |
| | | | 1.266; 46-58, | | |
| | | | 1.199; 95-101, | | |
| | | | 1.108; | | |
| DEX0448_002.orf.1 | N | 0 - i1-75; | 64-70, 1.108; | PKC_PHOSPHO_SITE 20-22; CK2_PHOSPHO_SITE | |
| | | | 38-46, 1.12; 21-27, | 6-9; PKC_PHOSPHO_SITE 6-8; | |
| | | | 1.092; 9-16, | CK2_PHOSPHO_SITE 37-40; PKC_PHOSPHO_SITE | |
| | | | 1.089; 48-60, | 50-52; CK2_PHOSPHO_SITE 46-49; | |
| | | | 1.14; | PKC_PHOSPHO_SITE 60-62; TYR_PHOSPHO_SITE | |
| | | | | 5-13; | |
| DEX0448_003.aa.1 | N | 1 - i1-87; | 178-184, 1.074; | PKC_PHOSPHO_SITE 169-171; PKC_PHOSPHO_SITE | sp_P07858_CATB_HUMAN 29-199; THIOL_PROTEASE_CYS |
| | | tm88-110; | 39-45, 1.078; 4-11, | 155-157; CK2_PHOSPHO_SITE 220-223; | 51-62; Peptidase_C1 Pept_C1 29-223; |
| | | o111-244; | 1.127; 26-33, | CK2_PHOSPHO_SITE 44-47; TYR_PHOSPHO_SITE | |
| | | | 1.094; 156-165, | 160-166; CK2_PHOSPHO_SITE 186-189; | |
| | | | 1.11; 202-217 | MYRISTYL 112-117; CK2_PHOSPHO_SITE 111-114; | |
| | | | 1.171; 53-66, | MYRISTYL 52-57; PKC_PHOSPHO_SITE 44-46; | |
| | | | 1.112; 116-141, | MYRISTYL 55-60; PKC_PHOSPHO_SITE 67-69; | |
| | | | 1.142; 85-109, | PKC_PHOSPHO_SITE 141-143; MYRISTYL 61-66; | |
| | | | 1.211; 68-80, | MYRISTYL 9-14; PKC_PHOSPHO_SITE 186-188; | |
| | | | 1.18; | CK2_PHOSPHO_SITE 184-187; | |
| | | | | CAMP_PHOSPHO_SITE 84-87; | |
| DEX0448_003.orf.1 | Y | 1 - o1-181; | | PKC_PHOSPHO_SITE 30-32; MICROBODIES_CTER | THIOL_PROTEASE_CYS 133-144; |
| | | | | 179-181; CK2_PHOSPHO_SITE 21-24; MYRISTYL | sp_P07858_CATB_HUMAN 111-160; |
| | | | | 32-37; MYRISTYL 34-39; CAMP_PHOSPHO_SITE | |
| | | | | 67-70; MYRISTYL 163-168; MYRISTYL 29-34; | |
| | | | | ASN_GLYCOSYLATION 34-37; MYRISTYL 37-42; | |
| | | | | ASN_GLYCOSYLATION 19-22; PKC_PHOSPHO_SITE | |
| | | | | 126-128; PKC_PHOSPHO_SITE 149-151; | |
| | | | | ASN_GLYCOSYLATION 28-31; MYRISTYL 153-158; | |
| | | | | MYRISTYL 134-139; CK2_PHOSPHO_SITE 126-129; | |
| | | | | ASN_GLYCOSYLATION 69-72; MYRISTYL | |
| | | | | 166-171; MYRISTYL 137-142; | |
| | | | | ASN_GLYCOSYLATION 31-34; PKC_PHOSPHO_SITE | |
| | | | | 21-23; MYRISTYL 91-96; MYRISTYL 26-31; | |
| | | | | MYRISTYL 143-148; | |
| DEX0448_004.aa.1 | N | 0 - o1-227; | | PKC_PHOSPHO_SITE 30-32; MYRISTYL 48-53; | |
| | | | | PKC_PHOSPHO_SITE 33-35; CK2_PHOSPHO_SITE | |
| | | | | 75-78; CK2_PHOSPHO_SITE 202-205; AMIDATION | |
| | | | | 176-179; ASN_GLYCOSYLATION 85-88; | |
| | | | | CK2_PHOSPHO_SITE 116-119; PKC_PHOSPHO_SITE | |
| | | | | 59-61; AMIDATION 83-86; MYRISTYL 45-50; | |
| | | | | ASN_GLYCOSYLATION 83-86; CK2_PHOSPHO_SITE | |
| | | | | 149-152; PKC_PHOSPHO_SITE 67-69; MYRISTYL | |
| | | | | 78-83; TYR_PHOSPHO_SITE 186-194; | |
| | | | | CK2_PHOSPHO_SITE 2-5; TYR_PHOSPHO_SITE 70-78; | |
| DEX0448_004.orf.1 | N | 0 - o1-222; | | CK2_PHOSPHO_SITE 98-101; PKC_PHOSPHO_SITE | |
| | | | | 64-66; MYRISTYL 201-206; MYRISTYL 149-154; | |
| | | | | PKC_PHOSPHO_SITE 215-217; CK2_PHOSPHO_SITE | |
| | | | | 59-62; AMIDATION 43-46; CK2_PHOSPHO_SITE | |
| | | | | 7-10; PKC_PHOSPHO_SITE 4-6; MYRISTYL 44-49; | |
| | | | | MYRISTYL 181-186; MYRISTYL 23-28; | |
| | | | | MYRISTYL 12-17; TYR_PHOSPHO_SITE 151-157; | |
| | | | | ASN_GLYCOSYLATION 148-151; | |
| | | | | PKC_PHOSPHO_SITE 19-21; MYRISTYL 185-190; | |
| DEX0448_005.aa.1 | Y | 0 - o1-74; | 4-15, 1.203; 62-71, | MYRISTYL 33-38; RGD 16-18; MYRISTYL 46-51; | |
| | | | 1.149; 18-39, | CK2_PHOSPHO_SITE 49-52; | |
| | | | 1.368; | | |
| DEX0448_005.orf.1 | Y | 0 - o1-85; | 29-50, 1.368; | CK2_PHOSPHO_SITE 60-63; MYRISTYL 44-49; | |
| | | | 19-26, 1.159; | MYRISTYL 57-62; CK2_PHOSPHO_SITE 16-19; | |
| | | | 73-82, 1.149; 4-11, | MYRISTYL 1-6; RGD 27-29; PKC_PHOSPHO_SITE | |
| | | | 1.223; | 16-18; MYRISTYL 5-10; | |
| DEX0448_005.orf.2 | Y | 0 - o1-85; | 4-11, 1.223; 19-26, | CK2_PHOSPHO_SITE 60-63; MYRISTYL 44-49; | |
| | | | 1.159; 73-82, | MYRISTYL 57-62; MYRISTYL 1-6; RGD 27-29; | |
| | | | 1.149; 29-50, | PKC_PHOSPHO_SITE 16-18; MYRISTYL 5-10; | |
| | | | 1.368; | CK2_PHOSPHO_SITE 16-19; | |
| DEX0448_006.aa.1 | N | 0 - o1-66; | 4-13, 1.116; 26-40, | PKC_PHOSPHO_SITE 16-18; CK2_PHOSPHO_SITE | |
| | | | 1.141; 50-63, | 6-9; CK2_PHOSPHO_SITE 55-58; | |
| | | | 1.077; | CK2_PHOSPHO_SITE 40-43; PKC_PHOSPHO_SITE | |
| | | | | 64-66; PKC_PHOSPHO_SITE 1-3; | |
| DEX0448_006.orf.1 | N | 0 - o1-66; | | PKC_PHOSPHO_SITE 1-3; PKC_PHOSPHO_SITE 41-43; | |
| | | | | CK2_PHOSPHO_SITE 6-9; PKC_PHOSPHO_SITE | |
| | | | | 16-18; ASN_GLYCOSYLATION 54-57; | |
| | | | | PKC_PHOSPHO_SITE 45-47; ASN_GLYCOSYLATION | |
| | | | | 52-55; MYRISTYL 54-59; | |
| DEX0448_007.aa.1 | N | 0 - o1-126; | 50-61, 1.121; | ASN_GLYCOSYLATION 75-78; MYRISTYL 103-108; | |
| | | | 95-108, 1.164; | CK2_PHOSPHO_SITE 116-119; MYRISTYL 95-100; | |
| | | | 110-115, 1.07; | CK2_PHOSPHO_SITE 111-114; | |
| | | | 64-90, 1.164; 4-30, | ASN_GLYCOSYLATION 109-112; MYRISTYL 97-102; | |
| | | | 1.198; 35-44, | | |
| | | | 1.091; | | |
| DEX0448_007.orf.1 | Y | 0 - o1-117; | 55-64, 1.091; | ASN_GLYCOSYLATION 95-98; | |
| | | | 70-81, 1.121; | | |
| | | | 84-110, 1.164; | | |
| | | | 4-50, 1.198; | | |
| DEX0448_008.aa.1 | N | 0 - o1-170; | 144-149, 1.042; | PKC_PHOSPHO_SITE 143-145; PKC_PHOSPHO_SITE | |
| | | | 118-125, 1.083; | 148-150; MYRISTYL 43-48; CAMP_PHOSPHO_SITE | |
| | | | 16-29, 1.194; | 31-34; | |
| | | | 68-74, 1.049; | | |
| | | | 35-57, 1.174; | | |
| | | | 90-105, 1.147; | | |
| | | | 153-159, 1.055; | | |
| | | | 132-141, 1.057; | | |
| | | | 107-116, 1.088; | | |
| | | | 161-167, 1.227; | | |
| DEX0448_008.orf.1 | N | 0 - o1-225; | | CK2_PHOSPHO_SITE 28-31; MYRISTYL 101-106; | |
| | | | | PKC_PHOSPHO_SITE 62-64; PKC_PHOSPHO_SITE | |
| | | | | 55-57; PKC_PHOSPHO_SITE 108-110; | |
| | | | | CK2_PHOSPHO_SITE 98-101; PKC_PHOSPHO_SITE | |
| | | | | 203-205; MYRISTYL 48-53; MYRISTYL 95-100; | |
| | | | | PKC_PHOSPHO_SITE 57-59; PKC_PHOSPHO_SITE | |
| | | | | 198-200; PKC_PHOSPHO_SITE 61-63; MYRISTYL | |
| | | | | 113-118; CK2_PHOSPHO_SITE 41-44; | |
| | | | | ASN_GLYCOSYLATION 68-71; MYRISTYL 41-46; | |
| | | | | CK2_PHOSPHO_SITE 40-43; MYRISTYL 110-115; | |
| | | | | MYRISTYL 57-62; PKC_PHOSPHO_SITE 40-42; | |
| DEX0448_009.aa.1 | N | 0 - o1-175; | 51-65, 1.157; | CK2_PHOSPHO_SITE 86-89; MYRISTYL 43-48; | |
| | | | 123-132, 1.171; | MYRISTYL 72-77; PKC_PHOSPHO_SITE 159-161; | |
| | | | 22-41, 1.188; | MYRISTYL 138-143; MYRISTYL 1-6; MYRISTYL | |
| | | | 161-172, 1.147; | 154-159; | |
| | | | 147-156, 1.167; | | |
| | | | 80-111, 1.118; | | |
| | | | 9-15, 1.083; | | |
| DEX0448_010.aa.1 | N | 1 - i1-32; | 51-59, 1.108; | MYRISTYL 47-52; AMIDATION 17-20; | |
| | | tm33-55; | 190-216, 1.143; | PKC_PHOSPHO_SITE 241-243; | |
| | | o56-270; | 64-72, 1.071; | ASN_GLYCOSYLATION 120-123; MYRISTYL 230-235; | |
| | | | 223-231, 1.133; | ASN_GLYCOSYLATION 114-117; | |
| | | | 135-145, 1.157; | CK2_PHOSPHO_SITE 9-12; MYRISTYL 31-36; | |
| | | | 125-133, 1.133; | MYRISTYL 206-211; MYRISTYL 22-27; | |
| | | | 234-240, 1.053; | CK2_PHOSPHO_SITE 145-148; MYRISTYL 252-257; | |
| | | | 29-48, 1.206; | | |
| | | | 95-101, 1.103; | | |
| | | | 82-89, 1.071; | | |
| | | | 253-259, 1.076; | | |
| | | | 170-177, 1.078; | | |
| DEX0448_011.aa.1 | N | 0 - o1-225; | 62-72, 1.069; 5-17, | PKC_PHOSPHO_SITE 65-67; CK2_PHOSPHO_SITE | sp_076045_076045_HUMAN 76-225; |
| | | | 1.236; 52-57, | 162-165; MYRISTYL 172-177; | COLFI 76-225; COLFI 59-225; |
| | | | 1.071; 198-210, | ASN_GLYCOSYLATION 198-201; MYRISTYL 175-180; | |
| | | | 1.111; 110-121, | CK2_PHOSPHO_SITE 89-92; | |
| | | | 1.105; 87-96, | PKC_PHOSPHO_SITE 130-132; PKC_PHOSPHO_SITE | |
| | | | 1.158; 21-38, | 82-84; TYR_PHOSPHO_SITE 39-46; | |
| | | | 1.084; 130-140, | | |
| | | | 1.146; 178-191, | | |
| | | | 1.123; | | |
| DEX0448_011.orf.1 | N | 0 - o1-121; | | MYRISTYL 71-76; MYRISTYL 68-73; | sp_076045_076045_HUMAN 1-121; |
| | | | | PKC_PHOSPHO_SITE 26-28; CK2_PHOSPHO_SITE | COLFI 3-121; COLFI 6-121; |
| | | | | 58-61; ASN_GLYCOSYLATION 94-97; | |
| DEX0448_012.aa.1 | Y | 1 - i1-6; tm7-29; | 8-55, 1.195; | TYR_PHOSPHO_SITE 55-63; | |
| | | o30-66; | | | |
| DEX0448_012.orf.1 | N | 0 - i1-81; | | PKC_PHOSPHO_SITE 53-55; CAMP_PHOSPHO_SITE | |
| | | | | 55-58; | |
| DEX0448_013.aa.1 | N | 0 - o1-253; | 76-81, 1.064; 4-19, | PKC_PHOSPHO_SITE 20-22; MYRISTYL 187-192; | DnaJ 2-64; DNAJ_1 49-68; |
| | | | 1.152; 166-183, | PKC_PHOSPHO_SITE 209-211; PKC_PHOSPHO_SITE | DNAJ_2 3-72; DnaJ 3-72; |
| | | | 1.13; 22-33, | 199-201; PKC_PHOSPHO_SITE 46-48; | |
| | | | 1.089; 49-61, | PKC_PHOSPHO_SITE 45-47; PKC_PHOSPHO_SITE | |
| | | | 1.108; 112-127, | 96-98; MYRISTYL 191-196; PKC_PHOSPHO_SITE | |
| | | | 1.133; 147-157, | 210-212; PKC_PHOSPHO_SITE 119-121; | |
| | | | 1.104; 229-244, | CK2_PHOSPHO_SITE 160-163; CK2_PHOSPHO_SITE | |
| | | | 1.17; | 89-92; CK2_PHOSPHO_SITE 85-88; | |
| DEX0448_013.orf.1 | N | 0 - o1-203; | | PKC_PHOSPHO_SITE 4-6; AMIDATION 30-33; | DnaJ 1-31; DNAJ_1 8-27; DNAJ_2 1-31; |
| | | | | MYRISTYL 101-106; CAMP_PHOSPHO_SITE 1-4; | |
| | | | | PKC_PHOSPHO_SITE 168-170; CK2_PHOSPHO_SITE | |
| | | | | 40-43; PKC_PHOSPHO_SITE 167-169; | |
| | | | | PKC_PHOSPHO_SITE 32-34; AMIDATION 31-34; | |
| | | | | MYRISTYL 104-109; PKC_PHOSPHO_SITE 157-159; | |
| | | | | MYRISTYL 145-150; PKC_PHOSPHO_SITE | |
| | | | | 102-104; TYR_PHOSPHO_SITE 24-32; MYRISTYL | |
| | | | | 64-69; MYRISTYL 149-154; PKC_PHOSPHO_SITE | |
| | | | | 5-7; CK2_PHOSPHO_SITE 118-121; | |
| DEX0448_014.aa.1 | N | 0 - i1-128; | 34-42, 1.121; | MYRISTYL 15-20; PKC_PHOSPHO_SITE 109-111; | KH_TYPE_2 21-92; KH 8-27; DNAJ_2 1-31; |
| | | | 69-76, 1.133; | AMIDATION 62-65; TYR_PHOSPHO_SITE 27-34; | |
| | | | 81-91, 1.1; 112-123, | PKC_PHOSPHO_SITE 6-8; CK2_PHOSPHO_SITE 44-47; | |
| | | | 1.129; 9-16, | CK2_PHOSPHO_SITE 35-38; | |
| | | | 1.074; 48-53, | | |
| | | | 1.079; 93-110, | | |
| | | | 1.126; | | |
| DEX0448_014.orf.1 | N | 0 - o1-143; | | ASN_GLYCOSYLATION 126-129; | KH_TYPE_2 36-107; KH 62-110; |
| | | | | PKC_PHOSPHO_SITE 128-130; MYRISTYL 13-18; | |
| | | | | MYRISTYL 123-128; MYRISTYL 5-10; | |
| | | | | PKC_PHOSPHO_SITE 21-23; MYRISTYL 30-35; | |
| | | | | ASN_GLYCOSYLATION 2-5; TYR_PHOSPHO_SITE | |
| | | | | 42-49; CK2_PHOSPHO_SITE 59-62; | |
| | | | | CAMP_PHOSPHO_SITE 1-4; CK2_PHOSPHO_SITE | |
| | | | | 50-53; MYRISTYL 2-7; CK2_PHOSPHO_SITE 115-118; | |
| | | | | AMIDATION 77-80; | |
| DEX0448_015.aa.1 | N | 0 - o1-75; | | CAMP_PHOSPHO_SITE 24-27; MYRISTYL 23-28; | |
| | | | | MYRISTYL 9-14; PKC_PHOSPHO_SITE 27-29; | |
| | | | | AMIDATION 27-30; PKC_PHOSPHO_SITE 23-25; | |
| | | | | CK2_PHOSPHO_SITE 40-43; ASN_GLYCOSYLATION | |
| | | | | 19-22; MYRISTYL 11-16; MYRISTYL 61-66; | |
| DEX0448_015.orf.1 | N | 0 - o1-110; | 17-26, 1.082; | PKCC_PHOSPHO_SITE 3-5; AMIDATION 35-38; | |
| | | | 101-107, 1.066; | MYRISTYL 47-52; PKC_PHOSPHO_SITE 26-28; | |
| | | | 6-13, 1.147; | MYRISTYL 66-71; MYRISTYL 2-7; MYRISTYL 13-18; | |
| | | | | PKC_PHOSPHO_SITE 70-72; | |
| | | | | CK2_PHOSPHO_SITE 21-24; MYRISTYL 17-22; | |
| DEX0448_016.aa.1 | N | 0 - o1-196; | 92-105, 1.124; | CK2_PHOSPHO_SITE 150-153; PKC_PHOSPHO_SITE | RIBOSOMAL_S17E 102-117; Ribosomal S17e 63-183; |
| | | | 146-160, 1.144; | 104-106; MYRISTYL 173-178; | |
| | | | 70-84, 1.113; 8-37, | PKC_PHOSPHO_SITE 131-133; CK2_PHOSPHO_SITE | |
| | | | 1.201; 175-183, | 17-20; PKC_PHOSPHO_SITE 91-93; | |
| | | | 1.1; 167-173, | TYR_PHOSPHO_SITE 75-82; PKC_PHOSPHO_SITE | |
| | | | 1.085; 52-68, | 26-28; PKC_PHOSPHO_SITE 2-4; | |
| | | | 1.147; 127-134, | PKC_PHOSPHO_SITE 191-193; PKC_PHOSPHO_SITE | |
| | | | 1.073; 112-120, | 69-71; | |
| | | | 1.107; 42-50, | | |
| | | | 1.126, | | |
| DEX0448_016.aa.2 | N | 0 - o1-207; | 4-19, 1.128; 46-52, | TYR_PHOSPHO_SITE 86-93; PKC_PHOSPHO_SITE | Ribosomal_S17e 73-S194; |
| | | | 1.028; 123-131, | 80-82; MYRISTYL 18-23; CK2_PHOSPHO_SITE | RIBOSOMAL_S17E |
| | | | 1.107; 81-95, | 161-164; PKC_PHOSPHO_SITE 115-117; | 113-128; |
| | | | 1.113; 157-171, | MRISTYL 184-189; MYRISTYL 48-53; | |
| | | | 1.144; 103-116, | PKC_PHOSPHO_SITE 142-144; PKC_PHOSPHO_SITE | |
| | | | 1.124; 186-194, | 202-204; PKC_PHOSPHO_SITE 102-104; | |
| | | | 1.1; 63-69, | | |
| | | | 1.06; 138-145, | | |
| | | | 1.073; 178-184, | | |
| | | | 1.085; | | |
| DEX0448_016.orf.2 | N | 0 - o1-180; | 159-167, 1.1; | PKC_PHOSPHO_SITE 53-55; MYRISTYL 157-162; | Ribosomal_S17e 46-167; |
| | | | 130-144, 1.144; | MYRISTYL 43-48; MYRISTYL 1-6; | RIBOSOMAL_S17E |
| | | | 151-157, 1.085; | PKC_PHOSPHO_SITE 175-177; PKC_PHOSPHO_SITE | 86-101; |
| | | | 96-104, 1.107; | 75-77; PKC_PHOSPHO_SITE 88-90; | |
| | | | 28-33, 1.028; 4-15, | TYR_PHOSPHO_SITE 59-66; PKC_PHOSPHO_SITE | |
| | | | 1.09; 111-118, | 115-117; MYRISTYL 29-34; CK2_PHOSPHO_SITE | |
| | | | 1.073; 76-89, | 134-137; | |
| | | | 1.124; 54-68, | | |
| | | | 1.113; | | |
| DEX0448_016.aa.3 | N | 0 - i1-150; | 114-134, 1.13; | CK2_PHOSPHO_SITE 89-92; PKC_PHOSPHO_SITE | Ribosomal_S17e 1-122; |
| | | | 31-44, 1.124; | 43-45; PKC_PHOSPHO_SITE 30-32; | RIBOSOMAL_S17E |
| | | | 66-73, 1.073; 9-23, | PKC_PHOSPHO_SITE 145-147; PKC_PHOSPHO_SITE | 41-56; |
| | | | 1.113; 85-99, | 8-10; MYRISTYL 112-117; PKC_PHOSPHO_SITE | |
| | | | 1.144; 106-112, | 70-72; TYR_PHOSPHO_SITE 14-21; | |
| | | | 1.085; 51-59, | | |
| | | | 1.107; | | |
| DEX0448_017.aa.1 | Y | 0 - o1-298; | 139-146, 1.126; | MYRISTYL 172-177; MYRISTYL 48-53; MYRISTYL | Ribosomal_L2_C 137-272; |
| | | | 53-64, 1.13; | 151-156; AMIDATION 131-134; | Ribosomal L2 |
| | | | 237-243, 1.073; | PKC_PHOSPHO_SITE 284-286; PKC_PHOSPHO_SITE | 52-131; |
| | | | 245-251, 1.062; | 195-197; MYRISTYL 122-127; | RIBOSOMAL_L2 238-249; |
| | | | 125-134, 1.124; | CK2_PHOSPHO_SITE 147-150; AMIDATION 272-275; | |
| | | | 203-213, 1.219; | PKC_PHOSPHO_SITE 184-186; MYRISTYL | |
| | | | 115-122, 1.054; | 208-213; MYRISTYL 96-101; PKC_PHOSPHO_SITE | |
| | | | 218-230, 1.059; | 265-267; CK2_PHOSPHO_SITE 292-295; | |
| | | | 188-201, 1.075; | MYRISTYL 277-282; CAMP_PHOSPHO_SITE 111-114; | |
| | | | 82-92, 1.106; | | |
| | | | 151-159, 1.199; | | |
| | | | 96-107, 1.166; | | |
| | | | 273-281, 1.102; | | |
| | | | 69-76, 1.084; | | |
| | | | 174-180, 1.112; | | |
| | | | 4-21, 1.195; | | |
| DEX0448_017.orf.1 | N | 0 - o1-271; | | MYRISTYL 21-26; CAMP_PHOSPHO_SITE 84-87; | Ribosomal_L2_C 110-245; |
| | | | | MYRISTYL 2-7; AMIDATION 245-248; MYRISTYL | RIBOSOMAL_L2 |
| | | | | 124-129; MYRISTYL 95-100; PKC_PHOSPHO_SITE | 211-222; |
| | | | | 257-259; PKC_PHOSPHO_SITE 157-159; | Ribosomal_L2 25-104; |
| | | | | MYRISTYL 1-6; CK2_PHOSPHO_SITE 120-123; | |
| | | | | PKC_PHOSPHO_SITE 168-170; MYRISTYL 250-255; | |
| | | | | MYRISTYL 181-186; MYRISTYL 69-74; | |
| | | | | AMIDATION 104-107; CK2_PHOSPHO_SITE 265-268; | |
| | | | | PKC_PHOSPHO_SITE 238-240; MYRISTYL | |
| | | | | 145-150; | |
| DEX0448_018.aa.1 | N | 0 - o1-550; | 244-258, 1.163; | CK2_PHOSPHO_SITE 260-263; TYR_PHOSPHO_SITE | HSP90 5-522; |
| | | | 279-285, 1.083; | 303-310; ASN_GLYCOSYLATION 412-415; | GLN_RICH 8-66; |
| | | | 160-183, 1.089; | PKC_PHOSPHO_SITE 435-437; MYRISTYL 530-535; | |
| | | | 316-324, 1.167; | PKC_PHOSPHO_SITE 475-477; MYRISTYL | |
| | | | 306-312, 1.088; | 526-531; PKC_PHOSPHO_SITE 277-279; | |
| | | | 8-28, 1.104; | PKC_PHOSPHO_SITE 78-80; MYRISTYL 173-178; | |
| | | | 191-215, 1.121; | CK2_PHOSPHO_SITE 159-162; PKC_PHOSPHO_SITE | |
| | | | 449-466, 1.21; | 230-232; PKC_PHOSPHO_SITE 29-31; | |
| | | | 134-140, 1.089; | ASN_GLYCOSYLATION 183-186; | |
| | | | 109-120, 1.138; | CK2_PHOSPHO_SITE 210-213; CK2_PHOSPHO_SITE | |
| | | | 290-301, 1.11; | 467-470; CK2_PHOSPHO_SITE 266-269; | |
| | | | 359-367, 1.08; | PKC_PHOSPHO_SITE 379-381; CK2_PHOSPHO_SITE | |
| | | | 267-273, 1.097; | 91-94; | |
| | | | 370-393, 1.221; | | |
| | | | 32-39, 1.056; | | |
| | | | 122-132, 1.11; | | |
| | | | 329-337, 1.126; | | |
| | | | 522-544, 1.199; | | |
| | | | 148-158, 1.145; | | |
| | | | 429-436, 1.102; | | |
| | | | 51-72, 1.095; | | |
| | | | 481-487, 1.069; | | |
| | | | 499-509, 1.063; | | |
| DEX0448_018.orf.1 | N | 0 - o1-190; | | CK2_PHOSPHO_SITE 10-13; ASN_GLYCOSYLATION | HSP90 1-189; |
| | | | | 162-165; PKC_PHOSPHO_SITE 129-131; | |
| | | | | CK2_PHOSPHO_SITE 16-19; TYR_PHOSPHO_SITE | |
| | | | | 53-60; PKC_PHOSPHO_SITE 27-29; | |
| DEX0448_019.aa.1 | N | 0 - i1-111; | 89-95, 1.136; | CAMP_PHOSPHO_SITE 106-109; | RIBOSOMAL_L18E 49-66; |
| | | | 21-35, 1.188; | PKC_PHOSPHO_SITE 104-106; | Ribosomal_L18e |
| | | | 79-85, 1.164; | ASN_GLYCOSYLATION 40-43; CK2_PHOSPHO_SITE | 10-111; |
| | | | 44-51, 1.166; | 85-88; PKC_PHOSPHO_SITE 56-58; | sp_Q07020_RL18_HUMAN |
| | | | | ASN_GLYCOSYLATION 77-80; | 28-97; |
| DEX0448_020.aa.1 | N | 0 - o1-261; | 110-140, 1.126; | MYRISTYL 232-237; CK2_PHOSPHO_SITE 245-248; | PROTEIN_KINASE_DOM |
| | | | 207-223, 1.108; | ASN_GLYCOSYLATION 254-257; MYRISTYL | 1-159; |
| | | | 69-93, 1.241; 7-12, | 66-71; CK2_PHOSPHO_SITE 192-195; MYRISTYL | sp_P54754_EPB3_MOUSE |
| | | | 1.048; 147-158, | 16-21; MYRISTYL 37-42; CK2_PHOSPHO_SITE | 79-161; TYRKINASE |
| | | | 1.092; 42-48, | 183-186; MYRISTYL 22-27; CK2_PHOSPHO_SITE | 82-104; TyrKc 13-155; |
| | | | 1.091; 16-31, | 80-83; CK2_PHOSPHO_SITE 106-109; MYRISTYL | SAM 186-250; |
| | | | 1.163; 176-187, | 70-75; CK2_PHOSPHO_SITE 96-99; | TYRKINASE 126-148; |
| | | | 1.085; 226-246, | PKC_PHOSPHO_SITE 164-166; CK2_PHOSPHO_SITE | SAM 185-252; |
| | | | 1.099; 164-171, | 224-227; MYRISTYL 32-37; | SAM_DOMAIN 188-252; |
| | | | 1.122; | | |
| DEX0448_021.aa.1 | N | 1 - i1-117; | 265-285, 1.106; | MYRISTYL 25-30; ASN_GLYCOSYLATION 86-89; | INTRLKN1R1F 123-151; |
| | | tm118-140; | 116-152, 1.242; | MYRISTYL 84-89; CK2_PHOSPHO_SITE 88-91; | INTRLKN1R1F |
| | | o141-361; | 180-188, 1.107; | ASN_GLYCOSYLATION 102-105; LEUCINE_ZIPPER | 178-202; TIR 163-243; |
| | | | 293-313, 1.064; | 123-144; PKC_PHOSPHO_SITE 356-358; | PRO_RICH 253-304; |
| | | | 4-113, 1.239; | MYRISTYL 333-338; MYRISTYL 294-299; | INTRLKN1R1F |
| | | | 195-208, 1.061; | PKC_PHOSPHO_SITE 241-243; | 160-174; |
| | | | 332-337, 1.052; | ASN_GLYCOSYLATION 73-76; CK2_PHOSPHO_SITE | INTRLKN1R1F 203-230; |
| | | | 211-258, 1.189; | 170-173; ASN_GLYCOSYLATION 217-220; | IG_LIKE 9-109; |
| | | | 164-174, 1.144; | MYRISTYL 94-99; AMIDATION 338-341; | |
| | | | 315-324, 1.062; | CK2_PHOSPHO_SITE 63-66; MYRISTYL 53-58; | |
| | | | | ASN_GLYCOSYLATION 31-34; MYRISTYL 59-64; | |
| | | | | CK2_PHOSPHO_SITE 13-16; | |
| DEX0448_021.aa.2 | N | 1 - o1-117; | 211-258, 1.189; | CK2_PHOSPHO_SITE 13-16; ASN_GLYCOSYLATION | INTRLKN1R1F 178-202; |
| | | tm118-140; | 293-313, 1.064; | 86-89; CK2_PHOSPHO_SITE 170-173; MYRISTYL | INTRLKN1R1F |
| | | i141-329; | 164-174, 1.144; | 59-64; CK2_PHOSPHO_SITE 63-66; MYRISTYL | 160-174; TIR 163-243; |
| | | | 265-285, 1.106; | 316-321; ASN_GLYCOSYLATION 217-220; | INTRLKN1R1F |
| | | | 180-188, 1.107; | MYRISTYL 294-299; PKC_PHOSPHO_SITE 241-243; | 123-151; PRO_RICH |
| | | | 4-113, 1.239; | CK2_PHOSPHO_SITE 88-91; MYRISTYL 53-58; | 253-304; |
| | | | 195-208, 1.061; | ASN_GLYCOSYLATION 73-76; | INTRLKN1R1F 203-230; |
| | | | 116-152, 1.242; | LEUCINE_ZIPPER 123-144; MYRISTYL 94-99; | IG_LIKE 9-109; |
| | | | | MYRISTYL 84-89; ASN_GLYCOSYLATION 102-105; | |
| | | | | ASN_GLYCOSYLATION 31-34; MYRISTYL 25-30; | |
| DEX0448_021.aa.3 | N | 0 - o1-164; | 85-91, 1.094; | PKC_PHOSPHO_SITE 150-152; PKC_PHOSPHO_SITE | |
| | | | 154-161, 1.177; | 11-13; CK2_PHOSPHO_SITE 137-140; | |
| | | | 38-50, 1.149; | CK2_PHOSPHO_SITE 160-163; MYRISTYL 128-133; | |
| | | | 21-28, 1.047; | CK2_PHOSPHO_SITE 100-103; | |
| | | | 112-120, 1.1; | ASN_GLYCOSYLATION 148-151; | |
| | | | 122-132, 1.078; | CK2_PHOSPHO_SITE 130-133; | |
| | | | 54-70, 1.128; | | |
| | | | 137-144, 1.091; | | |
| DEX0448_022.aa.1 | N | 1 - i1-27; | 29-50, 1.193; | CK2_PHOSPHO_SITE 7-10; MYRISTYL 58-63; | |
| | | tm28-50; | | | |
| | | o51-66; | | | |
| DEX0448_022.orf.1 | N | 0 - o1-135; | 4-15, 1.159; 18-28, | MYRISTYL 37-42; PKC_PHOSPHO_SITE 3-5; | |
| | | | 1.073; 105-112, | CK2_PHOSPHO_SITE 99-102; | |
| | | | 1.072; 41-100, | | |
| | | | 1.205; 30-37, | | |
| | | | 1.12; | | |
| DEX0448_022.aa.2 | N | 0 - o1-115; | 5-15, 1.073; 17-88, | CK2_PHOSPHO_SITE 87-90; | |
| | | | 1.205; 93-100, | | |
| | | | 1.072; | | |
| DEX0448_022.orf.2 | N | 0 - o1-135; | 105-112, 1.072; | MYRISTYL 37-42; PKC_PHOSPHO_SITE 3-5; | |
| | | | 41-100, 1.205; | CK2_PHOSPHO_SITE 99-102; | |
| | | | 30-37, 1.12; 18-28, | | |
| | | | 1.073; 4-15, | | |
| | | | 1.159; | | |
| DEX0448_023.aa.1 | N | 0 - o1-220; | 87-95, 1.12; | CK2_PHOSPHO_SITE 67-70; MYRISTYL 212-217; | G6PISOMERASE 39-60; |
| | | | 182-202, 1.117; | CK2_PHOSPHO_SITE 139-142; CK2_PHOSPHO_SITE | G6PISOMERASE 168-186; |
| | | | 173-180, 1.104; | 153-156; MYRISTYL 214-219; | G6PISOMERASE |
| | | | 13-51, 1.216; | CK2_PHOSPHO_SITE 8-11; MYRISTYL 168-173; | 186-200; PGI 1-220; |
| | | | 146-151, 1.03; | MYRISTYL 186-191; | G6PISOMERASE 200-213; |
| | | | 99-128, 1.174; | | |
| | | | 74-79, 1.072; | | |
| | | | 157-166, 1.153; | | |
| DEX0448_023.orf.1 | N | 0 - o1-287; | | MYRISTYL 3-8; CK2_PHOSPHO_SITE 265-268; | G6PISOMERASE 199-217; |
| | | | | MYRISTYL 243-248; MYRISTYL 217-222; | G6PISOMERASE |
| | | | | CK2_PHOSPHO_SITE 184-187; CK2_PHOSPHO_SITE | 70-91; PGI 2-275; |
| | | | | 39-42; MYRISTYL 199-204; CK2_PHOSPHO_SITE | G6PISOMERASE 231-244; |
| | | | | 98-101; CK2_PHOSPHO_SITE 170-173; MYRISTYL | P_GLUCOSE_ISOMERASE_2 |
| | | | | 10-15; MYRISTYL 6-11; | 231-248; |
| | | | | | G6PISOMERASE 217-231; |
| DEX0448_023.aa.2 | Y | 0 - o1-147; | 9-39, 1.137; | MYRISTYL 103-108; PKC_PHOSPHO_SITE 84-86; | |
| | | | 121-127, 1.071; | MYRISTYL 6-11; CK2_PHOSPHO_SITE 44-47; | |
| | | | 62-85, 1.145; | CK2_PHOSPHO_SITE 125-128; CK2_PHOSPHO_SITE | |
| | | | 42-60, 1.157; | 74-77; MYRISTYL 94-99; PKC_PHOSPHO_SITE | |
| | | | 101-109, 1.079; | 88-90; | |
| DEX0448_023.orf.2 | N | 0 - o1-150; | | CK2_PHOSPHO_SITE 110-113; CK2_PHOSPHO_SITE | |
| | | | | 146-149; CK2_PHOSPHO_SITE 102-105; | |
| | | | | MYRISTYL 98-103; CK2_PHOSPHO_SITE 76-79; | |
| | | | | MYRISTYL 58-63; CK2_PHOSPHO_SITE 136-139; | |
| | | | | MYRISTYL 90-95; CK2_PHOSPHO_SITE 82-85; | |
| DEX0448_023.aa.3 | N | 0 - o1-811; | 568-574, 1.073; | PKC_PHOSPHO_SITE 113-115; CK2_PHOSPHO_SITE | GLY_RICH 22-689; |
| | | | 604-610, 1.105; | 501-504; MYRISTYL 552-557; MYRISTYL 677-682; | |
| | | | 409-415, 1.106; | MYRISTYL 136-141; PKC_PHOSPHO_SITE | |
| | | | 521-527, 1.098; | 707-709; CK2_PHOSPHO_SITE 659-662; | |
| | | | 298-304, 1.112; | MYRISTYL 247-252; MYRISTYL 740-745; | |
| | | | 101-106, 1.071; | MYRISTYL 62-67; MYRISTYL 25-30; MYRISTYL | |
| | | | 719-724, 1.033; | 331-336; PKC_PHOSPHO_SITE 611-613; | |
| | | | 114-120, 1.079; | MYRISTYL 649-654; PKC_PHOSPHO_SITE 76-78; | |
| | | | 447-454, 1.12; | MYRISTYL 99-104; MYRISTYL 564-569; | |
| | | | 175-180, 1.071; | MYRISTYL 173-178; AMIDATION 403-406; | |
| | | | 150-156, 1.112; | PKC_PHOSPHO_SITE 187-189; PKC_PHOSPHO_SITE | |
| | | | 4-10, 1.083; | 39-41; MYRISTYL 543-548; PKC_PHOSPHO_SITE | |
| | | | 691-696, 1.085; | 520-522; MYRISTYL 728-733; | |
| | | | 334-341, 1.141; | PKC_PHOSPHO_SITE 403-405; MYRISTYL 555-560; | |
| | | | 667-673, 1.048; | MYRISTYL 506-511; MYRISTYL 652-657; | |
| | | | 748-762, 1.127; | MYRISTYL 210-215; PKC_PHOSPHO_SITE 224-226; | |
| | | | 39-45, 1.079; | CK2_PHOSPHO_SITE 538-541; | |
| | | | 372-378, 1.085; | | |
| | | | 768-773, 1.036; | | |
| | | | 433-441, 1.103; | | |
| | | | 642-647, 1.079; | | |
| | | | 64-69, 1.071; | | |
| | | | 360-365, 1.079; | | |
| | | | 617-624, 1.112; | | |
| | | | 261-268, 1.112; | | |
| | | | 249-259, 1.102; | | |
| | | | 187-195, 1.079; | | |
| | | | 275-280, 1.033; | | |
| | | | 224-232, 1.079; | | |
| | | | 791-798, 1.112; | | |
| | | | 78-83, 1.072; | | |
| | | | 386-391, 1.033; | | |
| DEX0448_023.orf.3 | N | 0 - o1-442; | 301-307, 1.112; | MYRISTYL 28-33; MYRISTYL 65-70; AMIDATION | |
| | | | 389-394, 1.033; | 406-409; MYRISTYL 213-218; | |
| | | | 375-381, 1.085; | PKC_PHOSPHO_SITE 227-229; MYRISTYL 139-144; | |
| | | | 228-235, 1.079; | MYRISTYL 250-255; MYRISTYL 334-339; | |
| | | | 264-271, 1.112; | PKC_PHOSPHO_SITE 406-408; PKC_PHOSPHO_SITE | |
| | | | 81-86, 1.072; | 190-192; PKC_PHOSPHO_SITE 116-118; | |
| | | | 278-283, 1.033; | MYRISTYL 176-181; MYRISTYL 102-107; | |
| | | | 412-418, 1.106; | PKC_PHOSPHO_SITE 79-81; PKC_PHOSPHO_SITE | |
| | | | 4-12, 1.083; | 42-44; | |
| | | | 191-198, 1.079; | | |
| | | | 42-48, 1.079; | | |
| | | | 153-159, 1.112; | | |
| | | | 252-262, 1.102; | | |
| | | | 117-123, 1.079; | | |
| | | | 337-344, 1.141; | | |
| DEX0448_024.aa.1 | N | 0 - o1-351; | 103-112, 1.117; | PKC_PHOSPHO_SITE 252-254; PKC_PHOSPHO_SITE | Ribosomal_L18ae 6-176; |
| | | | 9-31, 1.177; | 19-21; PKC_PHOSPHO_SITE 280-282; | |
| | | | 304-309, 1.077; | CK2_PHOSPHO_SITE 57-60; TYR_PHOSPHO_SITE | |
| | | | 217-222, 1.045; | 56-63; PKC_PHOSPHO_SITE 168-170; MYRISTYL | |
| | | | 59-78, 1.197; | 185-190; PKC_PHOSPHO_SITE 314-316; | |
| | | | 207-212, 1.07; | PKC_PHOSPHO_SITE 6-8; CK2_PHOSPHO_SITE 6-9; | |
| | | | 134-145, 1.093; | AMIDATION 330-333; PKC_PHOSPHO_SITE | |
| | | | 147-162, 1.141; | 169-171; PKC_PHOSPHO_SITE 263-265; | |
| | | | 120-132, 1.067; | MYRISTYL 240-245; PKC_PHOSPHO_SITE 262-264; | |
| | | | 34-51, 1.124; | CAMP_PHOSPHO_SITE 55-58; | |
| | | | 174-186, 1.127; | | |
| | | | 194-204, 1.129; | | |
| DEX0448_024.orf.1 | N | 0 - o1-223; | | TYR_PHOSPHO_SITE 68-75; PKC_PHOSPHO_SITE | Ribosomal_L18ae 18-188; |
| | | | | 181-183; CK2_PHOSPHO_SITE 4-7; | |
| | | | | PKC_PHOSPHO_SITE 180-182; MYRISTYL 5-10; | |
| | | | | CK2_PHOSPHO_SITE 18-21; PKC_PHOSPHO_SITE | |
| | | | | 31-33; PKC_PHOSPHO_SITE 18-20; MYRISTYL | |
| | | | | 197-202; CK2_PHOSPHO_SITE 69-72; | |
| | | | | CAMP_PHOSPHO_SITE 67-70; | |
| DEX0448_025.aa.1 | N | 0 - o1-260; | 31-39, 1.092; | CK2_PHOSPHO_SITE 96-99; ASN_GLYCOSYLATION | GLY_RICH 21-142; |
| | | | 149-156, 1.124; | 185-188; MYRISTYL 94-99; MYRISTYL 61-66; | |
| | | | 214-229, 1.133; | MYRISTYL 130-135; MYRISTYL 26-31; | |
| | | | 4-25, 1.135; 88-98, | PKC_PHOSPHO_SITE 163-165; MYRISTYL, 157-162; | |
| | | | 1.102; 243-257, | AMIDATION 193-196; MYRISTYL 33-38; | |
| | | | 1.196; 174-190, | MYRISTYL 29-34; MYRISTYL 79-84; MYRISTYL | |
| | | | 1.137; 116-122, | 159-164; PKC_PHOSPHO_SITE 14-16; MYRISTYL | |
| | | | 1.102; 198-205, | 37-42; PKC_PHOSPHO_SITE 66-68; | |
| | | | 1.096; 71-81, | CAMP_PHOSPHO_SITE 146-149; MYRISTYL 62-67; | |
| | | | 1.125; 55-60, | CK2_PHOSPHO_SITE 42-45; | |
| | | | 1.028; | | |
| DEX0448_025.orf.1 | N | 0 - o1-259; | 115-121, 1.102; | CK2_PHOSPHO_SITE 41-44; PKC_PHOSPHO_SITE | GLY_RICH 20-141; |
| | | | 213-228, 1.133; | 65-67; CK2_PHOSPHO_SITE 95-98; MYRISTYL | |
| | | | 4-24, 1.135; 30-38, | 156-161; MYRISTYL 78-83; MYRISTYL 28-33; | |
| | | | 1.092; 197-204, | MYRISTYL 60-65; MYRISTYL 32-37; | |
| | | | 1.096; 173-189, | ASN_GLYCOSYLATION 184-187; | |
| | | | 1.137; 54-59, | PKC_PHOSPHO_SITE 13-15; MYRISTYL 93-98; | |
| | | | 1.028; 148-155, | MYRISTYL 36-41; MYRISTYL 25-30; MYRISTYL | |
| | | | 1.124; 87-97, | 129-134; AMIDATION 192-195; | |
| | | | 1.102; 242-256, | PKC_PHOSPHO_SITE 162-164; MYRISTYL 158-163; | |
| | | | 1.196; 70-80, | CAMP_PHOSPHO_SITE 145-148; MYRISTYL | |
| | | | 1.125; | 61-66; | |
| DEX0448_026.aa.1 | N | 1 - o1-259; | 233-242, 1.159; | PKC_PHOSPHO_SITE 401-403; MYRISTYL 278-283; | IG_LIKE 86-237; |
| | | tm260-282; | 370-378, 1.142; | TYR_PHOSPHO_SITE 530-536; MYRISTYL 5-10; | ARG_RICH 485-606; |
| | | i283-650; | 316-342, 1.129; | MYRISTYL 517-522; CK2_PHOSPHO_SITE | TNFR_NGFR_1 267-304; |
| | | | 138-148, 1.099; | 185-188; TYR_PHOSPHO_SITE 546-552; | CYS_RICH 280-304; |
| | | | 259-312, 1.326; | MYRISTYL 482-487; CK2_PHOSPHO_SITE 222-225; | ADH_SHORT 296-324; |
| | | | 18-34, 1.089; | PKC_PHOSPHO_SITE 424-426; MYRISTYL | IG 96-239; |
| | | | 213-225, 1.271; | 13-18; MYRISTYL 181-186; PKC_PHOSPHO_SITE | |
| | | | 381-390, 1.102; | 172-174; CK2_PHOSPHO_SITE 436-439; | |
| | | | 491-503, 1.078; | CK2_PHOSPHO_SITE 504-507; PKC_PHOSPHO_SITE | |
| | | | 615-624, 1.092; | 467-469; PKC_PHOSPHO_SITE 14-16; MYRISTYL | |
| | | | 402-409, 1.095; | 354-359; PKC_PHOSPHO_SITE 169-171; | |
| | | | 183-189, 1.086; | MYRISTYL 55-60; CAMP_PHOSPHO_SITE 193-196; | |
| | | | 47-55, 1.089; | CK2_PHOSPHO_SITE 625-628; MYRISTYL 367-372; | |
| | | | 161-178, 1.17; | ASN_GLYCOSYLATION 578-581; MYRISTYL | |
| | | | 245-255, 1.105; | 61-66; PKC_PHOSPHO_SITE 464-466; | |
| | | | 57-66, 1.062; | CK2_PHOSPHO_SITE 531-534; MYRISTYL 228-233; | |
| | | | 120-135, 1.106; | MYRISTYL 579-584; TYR_PHOSPHO_SITE | |
| | | | 449-454, 1.054; | 581-587; MYRISTYL 214-219; | |
| | | | 69-114, 1.233; | CAMP_PHOSPHO_SITE 598-601; AMIDATION 191-194; | |
| | | | 150-155, 1.069; | ASN_GLYCOSYLATION 12-15; | |
| | | | 639-647, 1.109; | CK2_PHOSPHO_SITE 396-399; MYRISTYL 9-14; | |
| | | | | AMIDATION 517-520; TYR_PHOSPHO_SITE 609-617; | |
| DEX0448_026.aa.2 | N | 0 - o1-388; | 54-80, 1.129; | CK2_PHOSPHO_SITE 242-245; TYR_PHOSPHO_SITE | ADH_SHORT 34-62; |
| | | | 13-23, 1.141; | 319-325; CAMP_PHOSPHO_SITE 336-339; | ARG_RICH 223-344; |
| | | | 119-128, 1.102; | CK2_PHOSPHO_SITE 174-177; TYR_PHOSPHO_SITE | |
| | | | 29-50, 1.227; | 347-355; PKC_PHOSPHO_SITE 139-141; | |
| | | | 353-362, 1.092; | PKC_PHOSPHO_SITE 162-164; MYRISTYL 92-97; | |
| | | | 187-192, 1.054; | CK2_PHOSPHO_SITE 363-366; AMIDATION 255-258; | |
| | | | 140-147, 1.095; | PKC_PHOSPHO_SITE 205-207; MYRISTYL | |
| | | | 229-241, 1.078; | 220-225; CK2_PHOSPHO_SITE 38-41; | |
| | | | 108-116, 1.142; | TYR_PHOSPHO_SITE 284-290; | |
| | | | 377-385, 1.109; | ASN_GLYCOSYLATION 316-319; MYRISTYL 255-260; | |
| | | | | TYR_PHOSPHO_SITE 268-274; MYRISTYL | |
| | | | | 317-322; PKC_PHOSPHO_SITE 202-204; | |
| | | | | CK2_PHOSPHO_SITE 134-137; MYRISTYL 105-110; | |
| | | | | CK2_PHOSPHO_SITE 269-272; | |
| DEX0448_027.aa.1 | N | 0 - o1-83; | 8-15, 1.122; 35-51, | MYRISTYL 49-54; PKC_PHOSPHO_SITE 70-72; | |
| | | | 1.056; 61-70, | MYRISTYL 15-20; CK2_PHOSPHO_SITE 19-22; | |
| | | | 1.178; 17-23, | | |
| | | | 1.066; | | |
| DEX0448_027.orf.1 | N | 0 - o1-379; | 36-77, 1.182; | PKC_PHOSPHO_SITE 67-69; CK2_PHOSPHO_SITE | HLH_1 59-74; ORANGE |
| | | | 79-92, 1.088; | 237-240; MYRISTYL 91-96; CAMP_PHOSPHO_SITE | 107-151; HLH 25-80; |
| | | | 338-375, 1.175; | 156-159; PKC_PHOSPHO_SITE 98-100; | HLH_2 18-75; HLH |
| | | | 270-332, 1.197; | CK2_PHOSPHO_SITE 262-265; PKC_PHOSPHO_SITE | 20-75; |
| | | | 224-230, 1.069; | 155-157; MYRISTYL 321-326; | |
| | | | 135-152, 1.163; | PKC_PHOSPHO_SITE 254-256; CK2_PHOSPHO_SITE | |
| | | | 160-166, 1.055; | 206-209; CK2_PHOSPHO_SITE 269-272; | |
| | | | 108-126, 1.15; | PKC_PHOSPHO_SITE 154-156; CK2_PHOSPHO_SITE | |
| | | | 4-27, 1.171; | 197-200; PKC_PHOSPHO_SITE 216-218; | |
| | | | 184-197, 1.183; | PKC_PHOSPHO_SITE 19-21; AMIDATION 232-235; | |
| | | | | CAMP_PHOSPHO_SITE 234-237; | |
| | | | | CK2_PHOSPHO_SITE 202-205; CK2_PHOSPHO_SITE | |
| | | | | 104-107; CK2_PHOSPHO_SITE 204-207; | |
| | | | | ASN_GLYCOSYLATION 323-326; | |
| DEX0448_027.orf.2 | N | 0 - o1-379; | 160-166, 1.055; | MYRISTYL 91-96; PKC_PHOSPHO_SITE 155-157; | HLH 25-80; ORANGE |
| | | | 108-126, 1.15; | ASN_GLYCOSYLATION 323-326; | 107-151; HLH_1 59-74; |
| | | | 184-197, 1.183; | PKC_PHOSPHO_SITE 19-21; CK2_PHOSPHO_SITE | HLH_2 18-75; |
| | | | 79-92, 1.088; | 206-209; AMIDATION 232-235; | HLH 20-75; |
| | | | 135-152, 1.163; | CK2_PHOSPHO_SITE 202-205; | |
| | | | 224-230, 1.069; | CAMP_PHOSPHO_SITE 156-159; | |
| | | | 270-332, 1.197; | PKC_PHOSPHO_SITE 154-156; CK2_PHOSPHO_SITE | |
| | | | 4-27, 1.171; 36-77, | 237-240; CK2_PHOSPHO_SITE 204-207; | |
| | | | 1.182; 338-375, | CK2_PHOSPHO_SITE 197-200; CK2_PHOSPHO_SITE | |
| | | | 1.175; | 269-272; PKC_PHOSPHO_SITE 216-218; | |
| | | | | PKC_PHOSPHO_SITE 98-100; CAMP_PHOSPHO_SITE | |
| | | | | 234-237; CK2_PHOSPHO_SITE 262-265; | |
| | | | | MYRISTYL 321-326; PKC_PHOSPHO_SITE 254-256; | |
| | | | | CK2_PHOSPHO_SITE 104-107; | |
| | | | | PKC_PHOSPHO_SITE 67-69; | |
| DEX0448_027.aa.3 | N | 0 - o1-358; | 60-69, 1.117; | MYRISTYL 118-123; PKC_PHOSPHO_SITE 343-345; | |
| | | | 349-355, 1.057; | CK2_PHOSPHO_SITE 262-265; | |
| | | | 245-265, 1.091; | PKC_PHOSPHO_SITE 121-123; CK2_PHOSPHO_SITE | |
| | | | 148-157, 1.12; | 268-271; PKC_PHOSPHO_SITE 122-124; | |
| | | | 279-288, 1.174; | MYRISTYL 216-221; PKC_PHOSPHO_SITE 233-235; | |
| | | | 328-334, 1.079; | MYRISTYL 351-356; CK2_PHOSPHO_SITE | |
| | | | 17-23, 1.066; | 19-22; MYRISTYL 236-241; MYRISTYL 59-64; | |
| | | | 80-90, 1.123; | CK2_PHOSPHO_SITE 107-110; | |
| | | | 35-49, 1.127; | CAMP_PHOSPHO_SITE 53-56; PKC_PHOSPHO_SITE | |
| | | | 317-326, 1.107; | 249-251; CK2_PHOSPHO_SITE 95-98; | |
| | | | 167-223, 1.149; | CK2_PHOSPHO_SITE 286-289; PKC_PHOSPHO_SITE | |
| | | | 134-140, 1.039; | 219-221; PKC_PHOSPHO_SITE 332-334; | |
| | | | 225-233, 1.102; | CAMP_PHOSPHO_SITE 334-337; | |
| | | | 8-15, 1.122; | CK2_PHOSPHO_SITE 69-72; PKC_PHOSPHO_SITE | |
| | | | 294-312, 1.179; | 344-346; CK2_PHOSPHO_SITE 249-252; | |
| | | | | MYRISTYL 15-20; | |
| DEX0448_027.orf.3 | N | 0 - o1-329; | 216-236, 1.091; | MYRISTYL 30-35; CK2_PHOSPHO_SITE 220-223; | |
| | | | 31-40, 1.117; | CK2_PHOSPHO_SITE 40-43; CAMP_PHOSPHO_SITE | |
| | | | 320-326, 1.057; | 24-27; CK2_PHOSPHO_SITE 257-260; MYRISTYL | |
| | | | 288-297, 1.107; | 187-192; PKC_PHOSPHO_SITE 92-94; | |
| | | | 51-61, 1.123; | CK2_PHOSPHO_SITE 66-69; MYRISTYL 207-212; | |
| | | | 265-283, 1.179; | CK2_PHOSPHO_SITE 233-236; PKC_PHOSPHO_SITE | |
| | | | 196-204, 1.102; | 4-6; CK2_PHOSPHO_SITE 78-81; | |
| | | | 105-111, 1.039; | PKC_PHOSPHO_SITE 315-317; PKC_PHOSPHO_SITE | |
| | | | 119-128, 1.12; | 190-192; CAMP_PHOSPHO_SITE 305-308; | |
| | | | 250-259, 1.174; | PKC_PHOSPHO_SITE 93-95; PKC_PHOSPHO_SITE | |
| | | | 4-20, 1.063; | 220-222; PKC_PHOSPHO_SITE 303-305; | |
| | | | 299-305, 1.079; | CK2_PHOSPHO_SITE 239-242; MYRISTYL 322-327; | |
| | | | 138-194, 1.149; | MYRISTYL 89-94; PKC_PHOSPHO_SITE 314-316; | |
| | | | | PKC_PHOSPHO_SITE 204-206; | |
| DEX0448_027.orf.4 | N | 0 - o1-425; | 384-421, 1.175; | PKC_PHOSPHO_SITE 201-203; CK2_PHOSPHO_SITE | HLH_1 105-120; |
| | | | 125-138, 1.088; | 252-255; MYRISTYL 32-37; AMIDATION 278-281; | HLH_2 57-121; HLH |
| | | | 82-123, 1.182; | CAMP_PHOSPHO_SITE 202-205; | 66-121; HLH 71-126; |
| | | | 181-198, 1.163; | ASN_GLYCOSYLATION 369-372; | ORANGE 153-197; |
| | | | 206-212, 1.055; | CK2_PHOSPHO_SITE 248-251; CK2_PHOSPHO_SITE | |
| | | | 65-73, 1.09; | 308-311; MYRISTYL 55-60; PKC_PHOSPHO_SITE | |
| | | | 316-378, 1.197; | 200-202; CK2_PHOSPHO_SITE 283-286; | |
| | | | 44-52, 1.102; 4-10, | CK2_PHOSPHO_SITE 250-253; PKC_PHOSPHO_SITE | |
| | | | 1.067; 230-243, | 144-146; PKC_PHOSPHO_SITE 113-115; | |
| | | | 1.183; 270-276, | CAMP_PHOSPHO_SITE 280-283; | |
| | | | 1.069; 18-33, | CK2_PHOSPHO_SITE 243-246; PKC_PHOSPHO_SITE | |
| | | | 1.14; 154-172, | 65-67; PKC_PHOSPHO_SITE 262-264; | |
| | | | 1.15; | CK2_PHOSPHO_SITE 315-318; MYRISTYL 137-142; | |
| | | | | PKC_PHOSPHO_SITE 300-302; | |
| | | | | PKC_PHOSPHO_SITE 52-54; MYRISTYL 40-45; | |
| | | | | MYRISTYL 367-372; CK2_PHOSPHO_SITE 150-153; | |
| DEX0448_027.orf.5 | N | 0 - o1-425; | 18-33, 1.14; | CK2_PHOSPHO_SITE 252-255; | HLH 66-121; HLH 71-126; |
| | | | 125-138, 1.088; | CAMP_PHOSPHO_SITE 202-205; | HLH_2 57-121; |
| | | | 44-52, 1.102; | PKC_PHOSPHO_SITE 201-203; MYRISTYL 367-372; | HLH_1 105-120; |
| | | | 154-172, 1.15; | ASN_GLYCOSYLATION 369-372; | ORANGE 153-197; |
| | | | 316-378, 1.197; | CK2_PHOSPHO_SITE 250-253; PKC_PHOSPHO_SITE | |
| | | | 65-73, 1.09; | 262-264; MYRISTYL 40-45; CK2_PHOSPHO_SITE | |
| | | | 384-421, 1.175; | 315-318; PKC_PHOSPHO_SITE 300-302; | |
| | | | 270-276, 1.069; | CK2_PHOSPHO_SITE 308-311; CK2_PHOSPHO_SITE | |
| | | | 82-123, 1.182; | 243-246; CAMP_PHOSPHO_SITE 280-283; | |
| | | | 4-10, 1.067; | PKC_PHOSPHO_SITE 113-115; PKC_PHOSPHO_SITE | |
| | | | 230-243, 1.183; | 144-146; MYRISTYL 32-37; AMIDATION 278-281; | |
| | | | 206-212, 1.055; | PKC_PHOSPHO_SITE 65-67; | |
| | | | 181-198, 1.163; | CK2_PHOSPHO_SITE 248-251; PKC_PHOSPHO_SITE | |
| | | | | 52-54; PKC_PHOSPHO_SITE 200-202; MYRISTYL | |
| | | | | 55-60; MYRISTYL 137-142; CK2_PHOSPHO_SITE | |
| | | | | 150-153; CK2_PHOSPHO_SITE 283-286; | |
| DEX0448_027.aa.6 | N | 0 - o1-64; | 43-57, 1.159; 4-9, | ASN_GLYCOSYLATION 58-61; MYRISTYL 18-23; | |
| | | | 1.165; 20-30, | MYRISTYL 22-27; GLYCOSAMINOGLYCAN 15-18; | |
| | | | 1.111; | | |
| DEX0448_027.orf.6 | N | 0 - o1-111; | 4-9, 1.072; 12-64, | MYRISTYL 53-58; ASN_GLYCOSYLATION 55-58; | |
| | | | 1.197; 70-107, | | |
| | | | 1.175; | | |
| DEX0448_028.aa.1 | N | 1 - o1-115; | 5-10, 1.073; 81-91, | MYRISTYL 127-132; MYRISTYL 118-123; | IG_MHC 84-90; IGc1 |
| | | tm116-138; | 1.159; 27-55, | PKC_PHOSPHO_SITE 17-19; CK2_PHOSPHO_SITE | 26-96; ig 24-88; |
| | | i139-145; | 1.206; 108-142, | 61-64; | IG_LIKE 7-99; |
| | | | 1.208; 12-21, | | |
| | | | 1.125; 95-106, | | |
| | | | 1.112; 57-77, | | |
| | | | 1.129; | | |
| DEX0448_028.orf.1 | Y | 1 - o1-240; | 126-135, 1.074; | MYRISTYL 252-257; ASN_GLYCOSYLATION 50-53; | ig 149-213; IGc1 |
| | | tm241-263; | 74-81, 1.071; | MYRISTYL 243-248; MYRISTYL 67-72; | 151-221; IG_MHC |
| | | i264-270; | 182-202, 1.129; | PKC_PHOSPHO_SITE 142-144; CK2_PHOSPHO_SITE | 209-215; |
| | | | 233-267, 1.208; | 186-189; | MHC_II_alpha 50-133; |
| | | | 88-94, 1.082; | | IG_LIKE 130-224; |
| | | | 220-231, 1.112; | | |
| | | | 137-146, 1.125; | | |
| | | | 206-216, 1.159; | | |
| | | | 104-112, 1.079; | | |
| | | | 152-180, 1.206; | | |
| | | | 17-39, 1.172; | | |
| | | | 50-71, 1.187; | | |
| DEX0448_028.orf.2 | Y | 1 - o1-150; | 143-177, 1.208; | PKC_PHOSPHO_SITE 52-54; MYRISTYL 3-8; | ig 59-123; IG_MHC |
| | | tm151-173; | 130-141, 1.112; | MYRISTYL 162-167; CK2_PHOSPHO_SITE 96-99; | 119-125; IG_LIKE |
| | | i174-180; | 62-90, 1.206; | MYRISTYL 153-158; | 40-134; IGc1 61-131; |
| | | | 36-45, 1.074; | | |
| | | | 116-126, 1.159; | | |
| | | | 4-22, 1.247; 92-112, | | |
| | | | 1.129; 47-56, | | |
| | | | 1.125; | | |
| DEX0448_029.aa.1 | N | 0 - o1-796; | 508-553, 1.18; | PKC_PHOSPHO_SITE 502-504; MYRISTYL 619-624; | GPROTEINBRPT 325-339; |
| | | | 643-661, 1.105; | PKC_PHOSPHO_SITE 586-588; MYRISTYL | WD40 754-794; |
| | | | 597-603, 1.132; | 453-458; MYRISTYL 625-630; MYRISTYL 762-767; | WD40 755-794; WD40 |
| | | | 764-775, 1.122; | PKC_PHOSPHO_SITE 62-64; MYRISTYL 469-474; | 242-280; WD40 642-681; |
| | | | 664-670, 1.113; | MYRISTYL 583-588; ASN_GLYCOSYLATION | WD_REPEATS_2_2 |
| | | | 472-481, 1.114; | 6-9; CK2_PHOSPHO_SITE 275-278; | 520-561; EF_HAND |
| | | | 157-166, 1.115; | PKC_PHOSPHO_SITE 108-110; CK2_PHOSPHO_SITE | 327-339; |
| | | | 197-210, 1.113; | 335-338; MYRISTYL 577-582; MYRISTYL 383-388; | WD_REPEATS_2_3 603-644; |
| | | | 96-102, 1.04; | MYRISTYL 438-443; AMIDATION 639-642; | WD_REPEATS_2_4 |
| | | | 570-585, 1.178; | CK2_PHOSPHO_SITE 406-409; MYRISTYL 320-325; | 649-690; HELP 164-241; |
| | | | 441-458, 1.189; | MYRISTYL 270-275; ASN_GLYCOSYLATION | GPROTEINBRPT |
| | | | 723-729, 1.052; | 147-150; CK2_PHOSPHO_SITE 193-196; | 781-795; |
| | | | 701-713, 1.181; | CK2_PHOSPHO_SITE 2-5; PKC_PHOSPHO_SITE | GPROTEINBRPT 539-553; |
| | | | 333-338, 1.052; | 275-277; PKC_PHOSPHO_SITE 684-686; | WD40 341-380; |
| | | | 788-793, 1.169; | CK2_PHOSPHO_SITE 11-14; PKC_PHOSPHO_SITE | WD_REPEATS_2_5 761-796; |
| | | | 555-562, 1.057; | 387-389; TYR_PHOSPHO_SITE 201-208; | WD40 514-552; |
| | | | 732-738, 1.063; | CK2_PHOSPHO_SITE 20-23; MYRISTYL 61-66; | WD40 241-290; WD40 |
| | | | 74-84, 1.198; | PKC_PHOSPHO_SITE 758-760; MYRISTYL 100-105; | 597-635; WD40 555-593; |
| | | | 410-416, 1.069; | MYRISTYL 442-447; PKC_PHOSPHO_SITE | WD40 513-552; |
| | | | 343-380, 1.196; | 199-201; MYRISTYL 501-506; | WD40 431-469; WD40 |
| | | | 483-493, 1.082; | PKC_PHOSPHO_SITE 167-169; LEUCINE_ZIPPER | 387-426; WD40 293-338; |
| | | | 587-594, 1.062; | 26-47; CK2_PHOSPHO_SITE 239-242; MYRISTYL | WD40 710-748; |
| | | | 399-408, 1.24; | 510-515; CK2_PHOSPHO_SITE 162-165; | WD40 386-426; WD40 |
| | | | 216-242, 1.234; | CAMP_PHOSPHO_SITE 641-644; | 342-380; WD40 643-681; |
| | | | 16-50, 1.144; | PKC_PHOSPHO_SITE 131-133; CK2_PHOSPHO_SITE | WD_REPEATS_REGION |
| | | | 183-190, 1.101; | 489-492; PKC_PHOSPHO_SITE 119-121; | 329-796; WD40 430-469; |
| | | | 618-637, 1.233; | CK2_PHOSPHO_SITE 657-660; | WD40 596-635; |
| | | | 675-688, 1.078; | ASN_GLYCOSYLATION 91-94; MYRISTYL 784-789; | WD_REPEATS_2_1 437-468; |
| | | | 609-616, 1.15; | MYRISTYL 72-77; PKC_PHOSPHO_SITE 115-117; | WD40 707-748; |
| | | | 463-470, 1.095; | MYRISTYL 720-725; PKC_PHOSPHO_SITE 149-151; | |
| | | | 433-439, 1.108; | MYRISTYL 717-722; MYRISTYL 429-434; | |
| | | | 321-327, 1.154; | CK2_PHOSPHO_SITE 737-740; CK2_PHOSPHO_SITE | |
| | | | 120-132, 1.088; | 689-692; | |
| | | | 254-274, 1.152; | | |
| | | | 741-762, 1.2; | | |
| | | | 496-501, 1.078; | | |
| | | | 281-315, 1.231; | | |
| DEX0448_029.aa.2 | N | 0 - o1-627; | 85-105, 1.152; | PKC_PHOSPHO_SITE 417-419; CK2_PHOSPHO_SITE | WD_REPEATS_2_5 592-627; |
| | | | 164-169, 1.052; | 166-169; PKC_PHOSPHO_SITE 515-517; | WD40 73-111; |
| | | | 152-158, 1.154; | MYRISTYL 101-106; PKC_PHOSPHO_SITE 589-591; | WD_REPEATS_2_2_351-392; |
| | | | 554-560, 1.052; | MYRISTYL 414-419; MYRISTYL 332-337; | WD40 586-625; |
| | | | 386-393, 1.057; | MYRISTYL 456-461; MYRISTYL 548-553; | HELP 1-72; WD40 72-121; |
| | | | 449-468, 1.233; | MYRISTYL 300-305; PKC_PHOSPHO_SITE 333-335; | GPROTEINBRPT |
| | | | 532-544, 1.181; | CAMP_PHOSPHO_SITE 472-475; | 370-384; |
| | | | 572-593, 1.2; | CK2_PHOSPHO_SITE 237-240; MYRISTYL 341-346; | GPROTEINBRPT 156-170; |
| | | | 241-247, 1.069; | MYRISTYL 450-455; PKC_PHOSPHO_SITE | WD40 541-579; |
| | | | 230-239, 1.24; | 218-220; MYRISTYL 408-413; | WD40 173-211; WD40 |
| | | | 47-73, 1.234; | CK2_PHOSPHO_SITE 568-571; CK2_PHOSPHO_SITE | 345-383; WD40 262-300; |
| | | | 506-519, 1.078; | 520-523; PKC_PHOSPHO_SITE 106-108; | WD40 428-466; |
| | | | 440-447, 1.15; | MYRISTYL 284-289; MYRISTYL 273-278; | GPROTEINBRPT 612-626; |
| | | | 418-425, 1.062; | MYRISTYL 269-274; AMIDATION 470-473; | WD40 172-211; |
| | | | 272-289, 1.189; | TYR_PHOSPHO_SITE 32-39; MYRISTYL 615-620; | WD40 124-169; WD40 |
| | | | 112-146, 1.231; | CK2_PHOSPHO_SITE 24-27; MYRISTYL 214-219; | 218-257; WD40 217-257; |
| | | | 339-384, 1.18; | CK2_PHOSPHO_SITE 488-491; MYRISTYL 260-265; | EF_HAND 158-170; |
| | | | 563-569, 1.063; | CK2_PHOSPHO_SITE 70-73; MYRISTYL 151-156; | WD40 261-300; |
| | | | 28-41, 1.113; | MYRISTYL 551-556; CK2_PHOSPHO_SITE | WD40 474-512; WD40 |
| | | | 595-606, 1.122; | 106-109; CK2_PHOSPHO_SITE 320-323; | 427-466; WD40 473-512; |
| | | | 174-211, 1.196; | PKC_PHOSPHO_SITE 30-32; MYRISTYL 593-598; | WD_REPEATS_2_3 |
| | | | 428-434, 1.132; | | 434-475; |
| | | | 401-416, 1.178; | | WD_REPEATS_2_4 480-521; |
| | | | 303-312, 1.114; | | WD40 538-579; |
| | | | 327-332, 1.078; | | WD_REPEATS_REGION |
| | | | 474-492, 1.105; | | 160-627; WD40 386-424; |
| | | | 619-624, 1.169; | | WD40 344-383; |
| | | | 264-270, 1.108; | | WD_REPEATS_2_1 268-299; |
| | | | 314-324, 1.082; | | WD40 585-625; |
| | | | 294-301, 1.095; | | |
| | | | 495-501, 1.113; | | |
| | | | 14-21, 1.101; | | |
| DEX0448_029.aa.3 | N | 0 - o1-627; | 495-501, 1.113; | MYRISTYL 151-156; MYRISTYL 551-556; | WD40 124-169; WD40 |
| | | | 532-544, 1.181; | MYRISTYL 273-278; MYRISTYL 300-305; | 586-625; WD40 585-625; |
| | | | 85-105, 1.152; | MYRISTYL 269-274; MYRISTYL 214-219; | WD40 218-257; |
| | | | 449-468, 1.233; | CAMP_PHOSPHO_SITE 472-475; | WD40 386-424; |
| | | | 174-211, 1.196; | CK2_PHOSPHO_SITE 24-27; MYRISTYL 456-461; | WD_REPEATS_2_3 434-475; |
| | | | 112-146, 1.231; | MYRISTYL 260-265; CK2_PHOSPHO_SITE 70-73; | WD40 72-121; |
| | | | 272-289, 1.189; | CK2_PHOSPHO_SITE 237-240; MYRISTYL 593-598; | WD40 217-257; WD40 |
| | | | 401-416, 1.178; | MYRISTYL 615-620; CK2_PHOSPHO_SITE | 172-211; |
| | | | 14-21, 1.101; | 320-323; PKC_PHOSPHO_SITE 106-108; | WD_REPEATS_2_2 351-392; |
| | | | 595-606, 1.122; | CK2_PHOSPHO_SITE 488-491; AMIDATION 470-473; | WD_REPEATS_2_1 |
| | | | 339-384, 1.18; | PKC_PHOSPHO_SITE 333-335; MYRISTYL | 268-299; WD40 345-383; |
| | | | 474-492, 1.105; | 548-553; CK2_PHOSPHO_SITE 166-169; | WD_REPEATS_2_4 |
| | | | 264-270, 1.108; | PKC_PHOSPHO_SITE 417-419; CK2_PHOSPHO_SITE | 480-521; WD40 428-466; |
| | | | 303-312, 1.114; | 106-109; PKC_PHOSPHO_SITE 218-220; | EF_HAND 158-170; |
| | | | 327-332, 1.078; | MYRISTYL 341-346; MYRISTYL 408-413; | WD40 262-300; |
| | | | 428-434, 1.132; | PKC_PHOSPHO_SITE 589-591; PKC_PHOSPHO_SITE | HELP 1-72; |
| | | | 506-519, 1.078; | 30-32; PKC_PHOSPHO_SITE 515-517; MYRISTYL | WD_REPEATS_2_5 592-627; |
| | | | 241-247, 1.069; | 332-337; CK2_PHOSPHO_SITE 568-571; | GPROTEINBRPT |
| | | | 554-560, 1.052; | MYRISTYL 284-289; MYRISTYL 414-419; | 370-384; WD40 474-512; |
| | | | 164-169, 1.052; | TYR_PHOSPHO_SITE 32-39; MYRISTYL 101-106; | WD_REPEATS_REGION |
| | | | 294-301, 1.095; | CK2_PHOSPHO_SITE 520-523; MYRISTYL 450-455; | 160-627; |
| | | | 314-324, 1.082; | | GPROTEINBRPT 156-170; |
| | | | 28-41, 1.113; | | GPROTEINBRPT |
| | | | 619-624, 1.169; | | 612-626; WD40 538-579; |
| | | | 563-569, 1.063; | | WD40 173-211; |
| | | | 440-447, 1.15; | | WD40 261-300; WD40 |
| | | | 572-593, 1.2; | | 73-111; WD40 427-466; |
| | | | 152-158, 1.154; | | WD40 344-383; |
| | | | 47-73, 1.234; | | WD40 473-512; WD40 |
| | | | 230-239, 1.24; | | 541-579; |
| | | | 386-393, 1.057; | | |
| | | | 418-425, 1.062; | | |
| DEX0448_029.aa.4 | N | 0 - o1-483; | 237-244, 1.101; | PKC_PHOSPHO_SITE 329-331; MYRISTYL 29-34; | WD40 396-434; WD40 |
| | | | 453-462, 1.24; | PKC_PHOSPHO_SITE 441-443; PKC_PHOSPHO_SITE | 296-334; HELP 218-295; |
| | | | 150-156, 1.04; | 169-171; MYRISTYL 154-159; | WD40 295-344; |
| | | | 464-470, 1.069; | ASN_GLYCOSYLATION 145-148; | WD40 347-392; WD40 |
| | | | 174-186, 1.088; | PKC_PHOSPHO_SITE 221-223; LEUCINE_ZIPPER | 440-480; WD40 395-434; |
| | | | 308-328, 1.152; | 80-101; ASN_GLYCOSYLATION 201-204; | EF_HAND 381-393; |
| | | | 397-434, 1.196; | ASN_GLYCOSYLATION 60-63; CK2_PHOSPHO_SITE | WD40 441-480; |
| | | | 475-480, 1.052; | 389-392; MYRISTYL 30-35; MYRISTYL 31-36; | |
| | | | 211-220, 1.115; | MYRISTYL 33-38; PKC_PHOSPHO_SITE 203-205; | |
| | | | 5-10, 1.059; | CK2_PHOSPHO_SITE 65-68; MYRISTYL 115-120; | |
| | | | 251-264, 1.113; | CK2_PHOSPHO_SITE 460-463; CK2_PHOSPHO_SITE | |
| | | | 128-138, 1.198; | 247-250; PKC_PHOSPHO_SITE 173-175; | |
| | | | 41-56, 1.139; | MYRISTYL 26-31; MYRISTYL 324-329; | |
| | | | 375-381, 1.154; | PKC_PHOSPHO_SITE 185-187; PKC_PHOSPHO_SITE | |
| | | | 70-104, 1.144; | 253-255; CK2_PHOSPHO_SITE 293-296; | |
| | | | 387-392, 1.052; | MYRISTYL 126-131; MYRISTYL 27-32; MYRISTYL | |
| | | | 335-369, 1.231; | 374-379; CK2_PHOSPHO_SITE 329-332; | |
| | | | 270-296, 1.234; | CK2_PHOSPHO_SITE 74-77; PKC_PHOSPHO_SITE | |
| | | | | 116-118; PKC_PHOSPHO_SITE 162-164; | |
| | | | | CK2_PHOSPHO_SITE 216-219; MYRISTYL 24-29; | |
| | | | | MYRISTYL 437-442; MYRISTYL 45-50; | |
| | | | | TYR_PHOSPHO_SITE 255-262; | |
| DEX0448_029.aa.5 | N | 1 - i1-70; | 379-394, 1.178; | MYRISTYL 363-368; MYRISTYL 282-287; | WD_REPEATS_2_3 458-499; |
| | | tm71-93; | 134-168, 1.231; | PKC_PHOSPHO_SITE 493-495; CK2_PHOSPHO_SITE | WD40 519-557; |
| | | o94-605; | 361-376, 1.127; | 188-191; CK2_PHOSPHO_SITE 46-49; MYRISTYL | WD40 451-490; WD40 |
| | | | 252-261, 1.24; | 291-296; CAMP_PHOSPHO_SITE 450-453; | 195-233; WD40 95-133; |
| | | | 573-584, 1.122; | CK2_PHOSPHO_SITE 128-131; PKC_PHOSPHO_SITE | WD40 563-603; |
| | | | 10-19, 1.115; | 20-22; MYRISTYL 236-241; MYRISTYL 173-178; | HELP 17-94; WD40 |
| | | | 107-127, 1.152; | AMIDATION 448-451; MYRISTYL 386-391; | 356-402; |
| | | | 427-446, 1.233; | MYRISTYL 392-397; CK2_PHOSPHO_SITE 546-549; | WD_REPEATS_2_2 412-453; |
| | | | 406-412, 1.132; | MYRISTYL 529-534; MYRISTYL 526-531; | WD_REPEATS_REGION |
| | | | 294-311, 1.189; | CK2_PHOSPHO_SITE 342-345; PKC_PHOSPHO_SITE | 182-605; WD40 283-322; |
| | | | 349-354, 1.078; | 355-357; PKC_PHOSPHO_SITE 240-242; | GPROTEINBRPT |
| | | | 196-233, 1.196; | TYR_PHOSPHO_SITE 54-61; MYRISTYL 593-598; | 590-604; |
| | | | 186-191, 1.052; | MYRISTYL 306-311; MYRISTYL 322-327; | WD_REPEATS_2_1 290-321; |
| | | | 69-95, 1.234; | MYRISTYL 354-359; MYRISTYL 295-300; | WD40 516-557; |
| | | | 510-522, 1.181; | MYRISTYL 434-439; MYRISTYL 571-576; | WD40 240-279; WD40 |
| | | | 36-43, 1.101; | MYRISTYL 123-128; CK2_PHOSPHO_SITE 466-469; | 405-444; WD40 239-279; |
| | | | 452-470, 1.105; | CK2_PHOSPHO_SITE 15-18; | GPROTEINBRPT |
| | | | 597-602, 1.169; | PKC_PHOSPHO_SITE 567-569; MYRISTYL 428-433; | 477-491; WD40 194-233; |
| | | | 316-323, 1.095; | PKC_PHOSPHO_SITE 128-130; | GPROTEINBRPT |
| | | | 484-497, 1.078; | CK2_PHOSPHO_SITE 92-95; PKC_PHOSPHO_SITE | 178-192; WD40 284-322; |
| | | | 418-425, 1.15; | 52-54; MYRISTYL 5-10; CK2_PHOSPHO_SITE | EF_HAND 180-192; |
| | | | 174-180, 1.154; | 259-262; PKC_PHOSPHO_SITE 395-397; | WD40 94-143; |
| | | | 473-479, 1.113; | CK2_PHOSPHO_SITE 498-501; | WD40 146-191; WD40 |
| | | | 532-538, 1.052; | | 564-603; WD40 452-490; |
| | | | 263-269, 1.069; | | WD_REPEATS_2_4 |
| | | | 541-547, 1.063; | | 570-605; WD40 406-444; |
| | | | 286-292, 1.108; | | |
| | | | 396-403, 1.062; | | |
| | | | 550-571, 1.2; | | |
| | | | 325-334, 1.114; | | |
| | | | 336-346, 1.082; | | |
| | | | 50-63, 1.113; | | |
| DEX0448_029.aa.6 | N | 1 - i1-70; | 50-63, 1.113; | MYRISTYL 5-10; CK2_PHOSPHO_SITE 128-131; | WD40 194-233; |
| | | tm71-93; | 408-415, 1.057; | CK2_PHOSPHO_SITE 15-18; MYRISTYL 430-435; | WD_REPEATS_REGION_1 |
| | | o94-495; | 69-95, 1.234; | MYRISTYL 295-300; CK2_PHOSPHO_SITE 92-95; | 182-331; WD40 95-133; |
| | | | 450-456, 1.132; | MYRISTYL 322-327; PKC_PHOSPHO_SITE 439-441; | WD40 195-233; |
| | | | 174-180, 1.154; | PKC_PHOSPHO_SITE 240-242; | GPROTEINBRPT 392-406; |
| | | | 462-482, 1.15; | PKC_PHOSPHO_SITE 20-22; MYRISTYL 291-296; | WD40 367-405; |
| | | | 423-438, 1.178; | MYRISTYL 306-311; MYRISTYL 282-287; | WD40 240-279; |
| | | | 484-492, 1.185; | MYRISTYL 436-441; MYRISTYL 354-359; | GPROTEINBRPT 178-192; |
| | | | 10-19, 1.115; | PKC_PHOSPHO_SITE 355-357; TYR_PHOSPHO_SITE | WD40 408-446; |
| | | | 196-233, 1.196; | 54-61; MYRISTYL 363-368; MYRISTYL 173-178; | WD_REPEATS_2_2 373-414; |
| | | | 349-354, 1.078; | CK2_PHOSPHO_SITE 46-49; PKC_PHOSPHO_SITE | EF_HAND 180-192; |
| | | | 252-261, 1.24; | 128-130; PKC_PHOSPHO_SITE 52-54; MYRISTYL | WD40 146-191; |
| | | | 286-292, 1.108; | 480-485; MYRISTYL 236-241; | WD40 283-322; |
| | | | 361-406, 1.18; | CK2_PHOSPHO_SITE 342-345; CK2_PHOSPHO_SITE | WD_REPEATS_2_1 290-321; |
| | | | 440-447, 1.062; | 259-262; CK2_PHOSPHO_SITE 188-191; | WD_REPEATS_REGION_2 |
| | | | 263-269, 1.069; | MYRISTYL 123-128; | 373-414; |
| | | | 107-127, 1.152; | | GPROTEINBRPT 309-323; |
| | | | 336-346, 1.082; | | HELP 17-94; |
| | | | 134-168, 1.231; | | WD40 284-322; WD40 |
| | | | 186-191, 1.052; | | 366-405; WD40 94-143; |
| | | | 316-323, 1.095; | | WD40 239-279; |
| | | | 294-311, 1.189; | | |
| | | | 325-334, 1.114; | | |
| | | | 36-43, 1.101; | | |
| DEX0448_029.orf.7 | N | 0 - o1-536; | 201-206, 1.078; | MYRISTYL 317-322; MYRISTYL 158-163; | GPROTEINBRPT 521-535; |
| | | | 295-302, 1.057; | CK2_PHOSPHO_SITE 477-480; PKC_PHOSPHO_SITE | WD_REPEATS_2_2 |
| | | | 104-113, 1.24; | 498-500; CK2_PHOSPHO_SITE 397-400; | 260-301; |
| | | | 327-334, 1.062; | CK2_PHOSPHO_SITE 429-432; MYRISTYL 174-179; | WD_REPEATS_2_3 343-384; |
| | | | 115-121, 1.069; | MYRISTYL 7-12; MYRISTYL 323-328; | WD40 253-292; |
| | | | 415-428, 1.078; | PKC_PHOSPHO_SITE 207-209; MYRISTYL 134-139; | WD_REPEATS_2_1 142-173; |
| | | | 349-356, 1.15; | MYRISTYL 206-211; PKC_PHOSPHO_SITE | WD_REPEATS_REGION_1 |
| | | | 472-478, 1.063; | 92-94; CK2_PHOSPHO_SITE 12-15; MYRISTYL | 53-183; WD40 447-488; |
| | | | 528-533, 1.169; | 143-148; MYRISTYL 460-465; MYRISTYL 359-364; | WD40 495-534; |
| | | | 1.68-175, 1.095; | MYRISTYL 215-220; MYRISTYL 365-370; | WD40 136-174; |
| | | | 463-469, 1.052; | MYRISTYL 457-462; CK2_PHOSPHO_SITE 194-197; | WD_REPEATS_2_5 501-536; |
| | | | 230-236, 1.031; | AMIDATION 379-382; CK2_PHOSPHO_SITE | WD_REPEATS_2_4 |
| | | | 188-198, 1.082; | 111-114; MYRISTYL 88-93; PKC_PHOSPHO_SITE | 389-430; |
| | | | 310-325, 1.178; | 326-328; CK2_PHOSPHO_SITE 236-239; | GPROTEINBRPT 279-293; |
| | | | 138-144, 1.108; | PKC_PHOSPHO_SITE 424-426; MYRISTYL 502-507; | WD40 254-292; |
| | | | 404-410, 1.113; | MYRISTYL 258-263; MYRISTYL 147-152; | WD40 47-85; |
| | | | 481-502, 1.2; | CAMP_PHOSPHO_SITE 381-384; MYRISTYL 524-529; | GPROTEINBRPT 408-422; |
| | | | 337-343, 1.132; | PKC_PHOSPHO_SITE 12-14; | WD40 92-131; |
| | | | 383-401, 1.105; | | WD40 337-375; WD40 |
| | | | 213-228, 1.127; | | 45-85; WD40 383-421; |
| | | | 358-377, 1.233; | | WD40 450-488; |
| | | | 177-186, 1.114; | | WD40 382-421; WD40 |
| | | | 261-293, 1.129; | | 336-375; WD40 295-333; |
| | | | 243-254, 1.141; | | WD40 135-174; |
| | | | 18-85, 1.231; | | WD40 91-131; |
| | | | 504-515, 1.122; | | WD_REPEATS_REGION_2 |
| | | | 441-453, 1.181; | | 260-536; WD40 494-534; |
| | | | 146-163, 1.189; | | |
| DEX0448_029.aa.7 | N | 0 - o1-544; | 512-523, 1.122; | CK2_PHOSPHO_SITE 119-122; MYRISTYL 214-219; | WD40 55-93; WD40 |
| | | | 536-541, 1.169; | MYRISTYL 182-187; MYRISTYL 151-156; | 344-383; WD40 391-429; |
| | | | 318-333, 1.178; | MYRISTYL 155-160; PKC_PHOSPHO_SITE 215-217; | WD40 262-300; |
| | | | 209-214, 1.078; | MYRISTYL 15-20; CK2_PHOSPHO_SITE 244-247; | GPROTEINBRPT 416-430; |
| | | | 449-461, 1.181; | PKC_PHOSPHO_SITE 506-508; | GPROTEINBRPT |
| | | | 154-171, 1.189; | PKC_PHOSPHO_SITE 100-102; MYRISTYL 373-378; | 529-543; |
| | | | 335-342, 1.062; | MYRISTYL 142-147; PKC_PHOSPHO_SITE | WD_REPEATS_2_2 268-309; |
| | | | 26-93, 1.231; | 20-22; PKC_PHOSPHO_SITE 334-336; MYRISTYL | WD40 100-139; |
| | | | 269-301, 1.129; | 367-372; MYRISTYL 468-473; MYRISTYL 166-171; | WD40 458-496; WD40 |
| | | | 489-510, 1.2; | MYRISTYL 465-470; MYRISTYL 5-10; | 503-542; |
| | | | 176-183, 1.095; | CK2_PHOSPHO_SITE 202-205; CK2_PHOSPHO_SITE | WD_REPEATS_2_3 351-392; |
| | | | 221-236, 1.127; | 485-488; MYRISTYL 510-515; MYRISTYL 3-8; | WD40 390-429; |
| | | | 185-194, 1.114; | AMIDATION 387-390; MYRISTYL 532-537; | WD_REPEATS_2_1 150-181; |
| | | | 196-206, 1.082; | CK2_PHOSPHO_SITE 405-408; MYRISTYL 266-271; | WD40 502-542; |
| | | | 146-152, 1.108; | CAMP_PHOSPHO_SITE 389-392; | WD40 143-182; |
| | | | 345-351, 1.132; | PKC_PHOSPHO_SITE 432-434; MYRISTYL 96-101; | GPROTEINBRPT 287-301; |
| | | | 123-129, 1.069; | CK2_PHOSPHO_SITE 20-23; MYRISTYL 325-330; | WD_REPEATS_2_5 |
| | | | 423-436, 1.078; | CK2_PHOSPHO_SITE 437-440; MYRISTYL 223-228; | 509-544; WD40 99-139; |
| | | | 366-385, 1.233; | MYRISTYL 331-336; | WD_REPEATS_2_4 |
| | | | 303-310, 1.057; | | 397-438; |
| | | | 251-262, 1.141; | | WD_REPEATS_REGION_1 |
| | | | 480-486, 1.063; | | 61-191; WD40 53-93; |
| | | | 112-121, 1.24; | | WD40 144-182; WD40 |
| | | | 412-418, 1.113; | | 455-496; WD40 345-383; |
| | | | 471-477, 1.052; | | WD40 303-341; |
| | | | 357-364, 1.15; | | WD_REPEATS_REGION_2 |
| | | | 238-244, 1.031; | | 268-544; WD40 261-300; |
| | | | 391-409, 1.105; | | |
| DEX0448_030.orf.1 | N | 0 - o1-482; | | CK2_PHOSPHO_SITE 62-65; CK2_PHOSPHO_SITE | |
| | | | | 383-386; CK2_PHOSPHO_SITE 450-453; | |
| | | | | LEUCINE_ZIPPER 388-409; PKC_PHOSPHO_SITE | |
| | | | | 184-186; CK2_PHOSPHO_SITE 124-127; | |
| | | | | MYRISTYL 287-292; PKC_PHOSPHO_SITE 137-139; | |
| | | | | CK2_PHOSPHO_SITE 204-207; | |
| | | | | PKC_PHOSPHO_SITE 269-271; CK2_PHOSPHO_SITE | |
| | | | | 432-435; MYRISTYL 299-304; | |
| | | | | CK2_PHOSPHO_SITE 56-59; ASN_GLYCOSYLATION | |
| | | | | 322-325; CK2_PHOSPHO_SITE 403-406; | |
| | | | | PKC_PHOSPHO_SITE 276-278; MYRISTYL 89-94; | |
| | | | | PKC_PHOSPHO_SITE 204-206; MYRISTYL 472-477; | |
| | | | | CAMP_PHOSPHO_SITE 263-266; | |
| | | | | CK2_PHOSPHO_SITE 358-361; CK2_PHOSPHO_SITE | |
| | | | | 233-236; PKC_PHOSPHO_SITE 337-339; | |
| | | | | ASN_GLYCOSYLATION 231-234; MYRISTYL 95-100; | |
| | | | | LEUCINE_ZIPPER 395-416; | |
| | | | | CK2_PHOSPHO_SITE 308-311; MYRISTYL 91-96; | |
| DEX0448_030.aa.1 | N | 0 - o1-454; | 442-449, 1.086; | CK2_PHOSPHO_SITE 280-283; CK2_PHOSPHO_SITE | |
| | | | 352-357, 1.069; | 355-358; PKC_PHOSPHO_SITE 248-250; | |
| | | | 139-148, 1.118; | MYRISTYL 63-68; MYRISTYL 271-276; | |
| | | | 182-188, 1.068; | PKC_PROSPHO_SITE 241-243; MYRISTYL 259-264; | |
| | | | 25-32, 1.077; | PKC_PHOSPHO_SITE 176-178; | |
| | | | 48-57, 1.129; | CK2_PHOSPHO_SITE 330-333; PKC_PHOSPHO_SITE | |
| | | | 105-130, 1.126; | 309-311; PKC_PHOSPHO_SITE 109-111; | |
| | | | 335-346, 1.105; | MYRISTYL 67-72; CAMP_PHOSPHO_SITE 235-238; | |
| | | | 70-81, 1.193; | CK2_PHOSPHO_SITE 34-37; ASN_GLYCOSYLATION | |
| | | | 425-432, 1.074; | 203-206; CK2_PHOSPHO_SITE 205-208; | |
| | | | 414-422, 1.103; | LEUCINE_ZIPPER 367-388; ASN_GLYCOSYLATION | |
| | | | 259-265, 1.056; | 294-297; MYRISTYL 61-66; CK2_PHOSPHO_SITE | |
| | | | 206-216, 1.094; | 96-99; MYRISTYL 444-449; CK2_PHOSPHO_SITE | |
| | | | 363-387, 1.133; | 404-407; CK2_PHOSPHO_SITE 422-425; | |
| | | | 219-224, 1.047; | LEUCINE_ZIPPER 360-381; CK2_PHOSPHO_SITE | |
| | | | 236-247, 1.095; | 375-378; CK2_PHOSPHO_SITE 176-179; | |
| | | | 10-19, 1.097; | PKC_PHOSPHO_SITE 156-158; CK2_PHOSPHO_SITE | |
| | | | 168-173, 1.066; | 28-31; | |
| DEX0448_031.aa.1 | N | 0 - o1-340; | 325-337, 1.143; | ASN_GLYCOSYLATION 202-205; | NDK 55-193; |
| | | | 268-275, 1.139; | TYR_PHOSPHO_SITE 242-249; MYRISTYL 146-151; | sp_Q9Y5B8_NDK7_HUMAN |
| | | | 286-292, 1.062; | PKC_PHOSPHO_SITE 93-95; | 56-187; NDK 201-339; |
| | | | 58-67, 1.088; | CK2_PHOSPHO_SITE 14-17; CK2_PHOSPHO_SITE | sp_Q9Y5B8_NDK7_HUMAN |
| | | | 29-43, 1.154; | 284-287; MYRISTYL 164-169; | 207-336; |
| | | | 130-137, 1.069; | CK2_PHOSPHO_SITE 53-56; CK2_PHOSPHO_SITE | NUCDPKINASE 100-119; |
| | | | 200-225, 1.23; | 93-96; ASN_GLYCOSYLATION 280-283; MYRISTYL | NDK 56-203; |
| | | | 111-122, 1.068; | 191-196; PKC_PHOSPHO_SITE 53-55; | DM10 1-55; |
| | | | 98-107, 1.095; | PKC_PHOSPHO_SITE 155-157; PKC_PHOSPHO_SITE | NUCDPKINASE 120-137; |
| | | | 315-323, 1.141; | 197-199; MYRISTYL 27-32; MYRISTYL 303-308; | NUCDPKINASE |
| | | | 248-262, 1.146; | PKC_PHOSPHO_SITE 284-286; PKC_PHOSPHO_SITE | 167-186; |
| | | | 184-192, 1.056; | 47-49; PKC_PHOSPHO_SITE 304-306; | |
| DEX0448_032.orf.1 | N | 0 - o1-304; | | MYRISTYL 136-141; MYRISTYL 285-290; | RIBOSOMAL_L2 202-213; |
| | | | | PKC_PHOSPHO_SITE 229-231; PKC_PHOSPHO_SITE | Ribosomal_L2 |
| | | | | 248-250; CK2_PHOSPHO_SITE 256-259; | 16-95; |
| | | | | PKC_PHOSPHO_SITE 148-150; MYRISTYL 115-120; | Ribosomal_L2_C 101-236; |
| | | | | MYRISTYL 294-299; PKC_PHOSPHO_SITE | |
| | | | | 276-278; CAMP_PHOSPHO_SITE 75-78; MYRISTYL | |
| | | | | 12-17; AMIDATION 95-98; ASN_GLYCOSYLATION | |
| | | | | 271-274; MYRISTYL 60-65; PKC_PHOSPHO_SITE | |
| | | | | 159-161; AMIDATION 236-239; MYRISTYL 241-246; | |
| | | | | PKC_PHOSPHO_SITE 280-282; MYRISTYL | |
| | | | | 172-177; CK2_PHOSPHO_SITE 111-114; | |
| | | | | MYRISTYL 264-269; MYRISTYL 86-91; | |
| DEX0448_032.aa.1 | N | 0 - o1-185; | 90-96, 1.073; | MYRISTYL 130-135; MYRISTYL 61-66; MYRISTYL | RIBOSOMAL_L2 91-102; |
| | | | 56-66, 1.219; | 25-30; CK2_PHOSPHO_SITE 177-180; | Ribosomal_L2_C |
| | | | 41-54, 1.075; | PKC_PHOSPHO_SITE 48-50; MYRISTYL 175-180; | 1-125; |
| | | | 98-104, 1.062; | CK2_PHOSPHO_SITE 145-148; PKC_PHOSPHO_SITE | |
| | | | 4-12, 1.199; | 137-139; PKC_PHOSPHO_SITE 118-120; | |
| | | | 153-160, 1.097; | PKC_PHOSPHO_SITE 37-39; MYRISTYL 4-9; | |
| | | | 126-134, 1.102; | AMIDATION 125-128; | |
| | | | 27-33, 1.112; | | |
| | | | 71-83, 1.059; | | |
| DEX0448_033.orf.1 | N | 0 - o1-484; | 102-120, 1.266; | PKC_PHOSPHO_SITE 463-465; AMIDATION 214-217; | MR_MLE_2 288-319; |
| | | | 323-341, 1.148; | MYRISTYL 14-19; CK2_PHOSPHO_SITE 71-74; | MR_MLE_N 49-180; |
| | | | 123-129, 1.054; | CK2_PHOSPHO_SITE 320-323; | MR_MLE 217-468; |
| | | | 464-469, 1.084; | CK2_PHOSPHO_SITE 375-378; MYRISTYL 399-404; | |
| | | | 389-420, 1.2; | AMIDATION 1-4; CK2_PHOSPHO_SITE 321-324; | |
| | | | 245-253, 1.153; | PKC_PHOSPHO_SITE 370-372; | |
| | | | 308-314, 1.083; | CK2_PHOSPHO_SITE 84-87; MYRISTYL 89-94; | |
| | | | 260-267, 1.107; | PKC_PHOSPHO_SITE 244-246; CK2_PHOSPHO_SITE | |
| | | | 175-182, 1.165; | 189-192; MYRISTYL 339-344; | |
| | | | 206-212, 1.073; | CK2_PHOSPHO_SITE 201-204; MYRISTYL 94-99; | |
| | | | 185-194, 1.167; | ASN_GLYCOSYLATION 379-382; MYRISTYL 92-97; | |
| | | | 225-239, 1.095; | MYRISTYL 341-346; AMIDATION 7-10; | |
| | | | 15-67, 1.085; | | |
| | | | 422-448, 1.166; | | |
| | | | 475-481, 1.1; | | |
| | | | 92-98, 1.085; | | |
| | | | 148-166, 1.165; | | |
| | | | 75-84, 1.175; | | |
| | | | 349-375, 1.153; | | |
| | | | 378-386, 1.148; | | |
| | | | 274-279, 1.05; | | |
| DEX0448_033.aa.1 | N | 0 - o1-483; | 4-66, 1.085; | MYRISTYL 88-93; AMIDATION 213-216; | MR_MLE_N 48-179; |
| | | | 307-313, 1.083; | PKC_PHOSPHO_SITE 369-371; CK2_PHOSPHO_SITE | ALA_RICH 4-67; |
| | | | 174-181, 1.165; | 83-86; CK2_PHOSPHO_SITE 319-322; MYRISTYL | MR_MLE 216-467; |
| | | | 224-238, 1.095; | 340-345; CK2_PHOSPHO_SITE 320-323; | MR_MLE_2 287-318; |
| | | | 421-447, 1.166; | MYRISTYL 338-343; CK2_PHOSPHO_SITE 374-377; | |
| | | | 91-97, 1.085; | PKC_PHOSPHO_SITE 462-464; MYRISTYL | |
| | | | 377-385, 1.148; | 93-98; MYRISTYL 398-403; CK2_PHOSPHO_SITE | |
| | | | 147-165, 1.165; | 70-73; PKC_PHOSPHO_SITE 243-245; MYRISTYL | |
| | | | 205-211, 1.073; | 91-96; ASN_GLYCOSYLATION 378-381; | |
| | | | 259-266, 1.107; | CK2_PHOSPHO_SITE 200-203; CK2_PHOSPHO_SITE | |
| | | | 463-468, 1.084; | 188-191; | |
| | | | 184-193, 1.167; | | |
| | | | 474-480, 1.1; | | |
| | | | 101-119, 1.266; | | |
| | | | 273-278, 1.05; | | |
| | | | 322-340, 1.148; | | |
| | | | 244-252, 1.153; | | |
| | | | 122-128, 1.054; | | |
| | | | 388-419, 1.2; | | |
| | | | 74-83, 1.175; | | |
| | | | 348-374, 1.153; | | |
| DEX0448_033.orf.2 | N | 0 - o1-484; | 422-448, 1.166; | PKC_PHOSPHO_SITE 370-372; CK2_PHOSPHO_SITE | MR_MLE 217-468; |
| | | | 225-239, 1.095; | 71-74; CK2_PHOSPHO_SITE 84-87; AMIDATION | MR_MLE_N 49-180; |
| | | | 206-212, 1.073; | 7-10; MYRISTYL 92-97; AMIDATION 214-217; | MR_MLE_2 288-319; |
| | | | 102-120, 1.266; | MYRISTYL 94-99; CK2_PHOSPHO_SITE 201-204; | |
| | | | 323-341, 1.148; | MYRISTYL 399-404; ASN_GLYCOSYLATION 379-382; | |
| | | | 185-194, 1.167; | CK2_PHOSPHO_SITE 375-378; MYRISTYL | |
| | | | 378-386, 1.148; | 341-346; CK2_PHOSPHO_SITE 320-323; | |
| | | | 15-67, 1.085; | MYRISTYL 14-19; MYRISTYL 339-344; | |
| | | | 274-279, 1.05; | PKC_PHOSPHO_SITE 244-246; CK2_PHOSPHO_SITE | |
| | | | 175-182, 1.165; | 321-324; CK2_PHOSPHO_SITE 189-192; | |
| | | | 260-267, 1.107; | AMIDATION 1-4; MYRISTYL 89-94; | |
| | | | 464-469, 1.084; | PKC_PHOSPHO_SITE 463-465; | |
| | | | 123-129, 1.054; | | |
| | | | 75-84, 1.175; | | |
| | | | 349-375, 1.153; | | |
| | | | 148-166, 1.165; | | |
| | | | 245-253, 1.153; | | |
| | | | 92-98, 1.085; | | |
| | | | 308-314, 1.083; | | |
| | | | 389-420, 1.2; | | |
| | | | 475-481, 1.1; | | |
| DEX0448_033.orf.3 | N | 0 - o1-484; | 15-67, 1.085; | PKC_PHOSPHO_SITE 370-372; MYRISTYL 92-97; | MR_MLE_N 49-180; |
| | | | 389-420, 1.2; | AMIDATION 214-217; CK2_PHOSPHO_SITE 320-323; | MR_MLE_2 288-319; |
| | | | 175-182, 1.165; | PKC_PHOSPHO_SITE 463-465; MYRISTYL | MR_MLE 217-468; |
| | | | 323-341, 1.148; | 14-19; CK2_PHOSPHO_SITE 375-378; | |
| | | | 349-375, 1.153; | CK2_PHOSPHO_SITE 71-74; CK2_PHOSPHO_SITE | |
| | | | 123-129, 1.054; | 201-204; MYRISTYL 339-344; | |
| | | | 464-469, 1.084; | PKC_PHOSPHO_SITE 244-246; AMIDATION 7-10; | |
| | | | 75-84, 1.175; | CK2_PHOSPHO_SITE 84-87; MYRISTYL 341-346; | |
| | | | 245-253, 1.153; | AMIDATION 1-4; MYRISTYL 94-99; MYRISTYL | |
| | | | 92-98, 1.085; | 399-404; ASN_GLYCOSYLATION 379-382; | |
| | | | 148-166, 1.165; | CK2_PHOSPHO_SITE 321-324; MYRISTYL 89-94; | |
| | | | 378-386, 1.148; | CK2_PHOSPHO_SITE 189-192; | |
| | | | 225-239, 1.095; | | |
| | | | 308-314, 1.083; | | |
| | | | 475-481, 1.1; | | |
| | | | 274-279, 1.05; | | |
| | | | 185-194, 1.167; | | |
| | | | 102-120, 1.266; | | |
| | | | 206-212, 1.073; | | |
| | | | 260-267, 1.107; | | |
| | | | 422-448, 1.166; | | |
| DEX0448_033.orf.4 | N | 0 - o1-249; | 39-44, 1.05; | CK2_PHOSPHO_SITE 85-88; PKC_PHOSPHO_SITE | MR_MLE_2 53-84; |
| | | | 143-151, 1.148; | 135-137; CK2_PHOSPHO_SITE 86-89; MYRISTYL | MR_MLE 2-233; |
| | | | 154-185, 1.2; | 164-169; PKC_PHOSPHO_SITE 228-230; | |
| | | | 88-106, 1.148; | PKC_PHOSPHO_SITE 16-18; MYRISTYL 104-109; | |
| | | | 24-32, 1.107; | MYRISTYL 106-111; CK2_PHOSPHO_SITE 140-143; | |
| | | | 187-213, 1.166; | ASN_GLYCOSYLATION 144-147; | |
| | | | 229-234, 1.084; | | |
| | | | 73-79, 1.083; | | |
| | | | 114-140, 1.153; | | |
| | | | 240-246, 1.1; | | |
| DEX0448_033.aa.4 | N | 0 - o1-221; | 91-97, 1.085; | CK2_PHOSPHO_SITE 200-203; CK2_PHOSPHO_SITE | MR_MLE_N 48-179; |
| | | | 184-193, 1.167; | 70-73; CK2_PHOSPHO_SITE 188-191; AMIDATION | ALA_RICH 4-67; |
| | | | 122-128, 1.054; | 213-216; CK2_PHOSPHO_SITE 83-86; MYRISTYL | |
| | | | 4-66, 1.085; | 93-98; MYRISTYL 91-96; MYRISTYL 88-93; | |
| | | | 174-181, 1.165; | | |
| | | | 74-83, 1.175; | | |
| | | | 205-211, 1.073; | | |
| | | | 101-119, 1.266; | | |
| | | | 147-165, 1.165; | | |
| DEX0448_033.orf.5 | N | 0 - o1-416; | 404-413, 1.123; | MYRISTYL 94-99; CK2_PHOSPHO_SITE 201-204; | MR_MLE_2 288-319; |
| | | | 102-120, 1.266; | CK2_PHOSPHO_SITE 189-192; AMIDATION 7-10; | MR_MLE_N 49-180; |
| | | | 396-401, 1.059; | MYRISTYL 89-94; CK2_PHOSPHO_SITE 321-324; | |
| | | | 225-239, 1.095; | CK2_PHOSPHO_SITE 71-74; CK2_PHOSPHO_SITE | |
| | | | 123-129, 1.054; | 402-405; MYRISTYL 339-344; | |
| | | | 323-341, 1.148; | PKC_PHOSPHO_SITE 367-369; AMIDATION 1-4; | |
| | | | 148-166, 1.165; | AMIDATION 214-217; MYRISTYL 14-19; | |
| | | | 15-67, 1.085; | MYRISTYL 376-381; CK2_PHOSPHO_SITE 84-87; | |
| | | | 185-194, 1.167; | CK2_PHOSPHO_SITE 320-323; MYRISTYL 92-97; | |
| | | | 274-279, 1.05; | MYRISTYL 341-346; PKC_PHOSPHO_SITE 244-246; | |
| | | | 370-394, 1.156; | | |
| | | | 175-182, 1.165; | | |
| | | | 206-212, 1.073; | | |
| | | | 75-84, 1.175; | | |
| | | | 92-98, 1.085; | | |
| | | | 245-253, 1.153; | | |
| | | | 260-267, 1.107; | | |
| | | | 308-314, 1.083; | | |
| DEX0448_033.aa.5 | N | 0 - o1-415; | 174-181, 1.165; | MYRISTYL 340-345; CK2_PHOSPHO_SITE 200-203; | ALA_RICH 4-67; |
| | | | 307-313, 1.083; | MYRISTYL 91-96; CK2_PHOSPHO_SITE 83-86; | MR_MLE_2 287-318; |
| | | | 205-211, 1.073; | CK2_PHOSPHO_SITE 188-191; MYRISTYL 93-98; | MR_MLE_N 48-179; |
| | | | 369-393, 1.156; | CK2_PHOSPHO_SITE 70-73; MYRISTYL 375-380; | |
| | | | 395-400, 1.059; | MYRISTYL 338-343; MYRISTYL 88-93; | |
| | | | 91-97, 1.085; | AMIDATION 213-216; CK2_PHOSPHO_SITE 401-404; | |
| | | | 184-193, 1.167; | PKC_PHOSPHO_SITE 243-245; | |
| | | | 122-128, 1.054; | CK2_PHOSPHO_SITE 320-323; PKC_PHOSPHO_SITE | |
| | | | 403-412, 1.123; | 366-368; CK2_PHOSPHO_SITE 319-322; | |
| | | | 322-340, 1.148; | | |
| | | | 224-238, 1.095; | | |
| | | | 259-266, 1.107; | | |
| | | | 244-252, 1.153; | | |
| | | | 74-83, 1.175; | | |
| | | | 273-278, 1.05; | | |
| | | | 4-66, 1.085; | | |
| | | | 147-165, 1.165; | | |
| | | | 101-119, 1.266; | | |
| DEX0448_033.orf.6 | N | 0 - o1-484; | 92-98, 1.085; | MYRISTYL 14-19; MYRISTYL 399-404; | MR_MLE 217-468; |
| | | | 378-386, 1.148; | ASN_GLYCOSYLATION 379-382; | MR_MLE_2 288-319; |
| | | | 75-84, 1.175; | PKC_PHOSPHO_SITE 244-246; CK2_PHOSPHO_SITE | MR_MLE_N 49-180; |
| | | | 349-375, 1.153; | 375-378; CK2_PHOSPHO_SITE 189-192; | |
| | | | 206-212, 1.073; | AMIDATION 1-4; PKC_PHOSPHO_SITE 463-465; | |
| | | | 422-448, 1.166; | MYRISTYL 341-346; MYRISTYL 89-94; | |
| | | | 225-239, 1.095; | CK2_PHOSPHO_SITE 71-74; CK2_PHOSPHO_SITE | |
| | | | 274-279, 1.05; | 84-87; AMIDATION 214-217; MYRISTYL 94-99; | |
| | | | 185-194, 1.167; | CK2_PHOSPHO_SITE 321-324; MYRISTYL 92-97; | |
| | | | 123-129, 1.054; | PKC_PHOSPHO_SITE 370-372; CK2_PHOSPHO_SITE | |
| | | | 260-267, 1.107; | 320-323; MYRISTYL 339-344; AMIDATION 7-10; | |
| | | | 475-481, 1.1; | CK2_PHOSPHO_SITE 201-204; | |
| | | | 389-420, 1.2; | | |
| | | | 15-67, 1.085; | | |
| | | | 245-253, 1.153; | | |
| | | | 148-166, 1.165; | | |
| | | | 308-314, 1.083; | | |
| | | | 102-120, 1.266; | | |
| | | | 464-469, 1.084; | | |
| | | | 323-341, 1.148; | | |
| | | | 175-182, 1.165; | | |
| DEX0448_033.orf.7 | N | 0 - o1-349; | 75-84, 1.175; | MYRISTYL 92-97; CK2_PHOSPHO_SITE 71-74; | MR_MLE_2 288-319; |
| | | | 92-98, 1.085; | PKC_PHOSPHO_SITE 244-246; CK2_PHOSPHO_SITE | MR_MLE_N 49-180; |
| | | | 185-194, 1.167; | 321-324; MYRISTYL 339-344; | |
| | | | 15-67, 1.085; | CK2_PHOSPHO_SITE 201-204; CK2_PHOSPHO_SITE | |
| | | | 102-120, 1.266; | 189-192; MYRISTYL 341-346; | |
| | | | 225-239, 1.095; | CK2_PHOSPHO_SITE 320-323; AMIDATION 214-217; | |
| | | | 308-314, 1.083; | MYRISTYL 94-99; AMIDATION 7-10; | |
| | | | 274-279, 1.05; | MYRISTYL 14-19; AMIDATION 1-4; MYRISTYL | |
| | | | 323-341, 1.148; | 89-94; CK2_PHOSPHO_SITE 84-87; | |
| | | | 148-166, 1.165; | | |
| | | | 206-212, 1.073; | | |
| | | | 245-253, 1.153; | | |
| | | | 123-129, 1.054; | | |
| | | | 175-182, 1.165; | | |
| | | | 260-267, 1.107; | | |
| DEX0448_033.aa.7 | N | 0 - o1-305; | 79-85, 1.054; | CK2_PHOSPHO_SITE 145-148; AMIDATION 170-173; | MR_MLE_N 5-136; |
| | | | 162-168, 1.073; | CK2_PHOSPHO_SITE 157-160; MYRISTYL | MR_MLE_2 244-275; |
| | | | 104-122, 1.165; | 295-300; CK2_PHOSPHO_SITE 40-43; | |
| | | | 201-209, 1.153; | CK2_PHOSPHO_SITE 277-280; MYRISTYL 50-55; | |
| | | | 4-23, 1.085; | MYRISTYL 45-50; MYRISTYL 48-53; MYRISTYL | |
| | | | 131-138, 1.165; | 297-302; CK2_PHOSPHO_SITE 27-30; | |
| | | | 48-54, 1.085; | CK2_PHOSPHO_SITE 276-279; PKC_PHOSPHO_SITE | |
| | | | 264-270, 1.083; | 200-202; | |
| | | | 141-150, 1.167; | | |
| | | | 181-195, 1.095; | | |
| | | | 279-297, 1.148; | | |
| | | | 230-235, 1.05; | | |
| | | | 31-40, 1.175; | | |
| | | | 58-76, 1.266; | | |
| | | | 216-223, 1.107; | | |
| DEX0448_033.orf.8 | N | 0 - o1-484; | 185-194, 1.167; | CK2_PHOSPHO_SITE 321-324; MYRISTYL 94-99; | MR_MLE 217-468; |
| | | | 175-182, 1.165; | MYRISTYL 339-344; PKC_PHOSPHO_SITE 370-372; | MR_MLE_N 49-180; |
| | | | 475-481, 1.1; | CK2_PHOSPHO_SITE 320-323; MYRISTYL | MR_MLE_2 288-319; |
| | | | 260-267, 1.107; | 14-19; CK2_PHOSPHO_SITE 201-204; MYRISTYL | |
| | | | 422-448, 1.166; | 89-94; AMIDATION 7-10; CK2_PHOSPHO_SITE | |
| | | | 123-129, 1.054; | 84-87; AMIDATION 1-4; PKC_PHOSPHO_SITE | |
| | | | 75-84, 1.175; | 244-246; MYRISTYL 399-404; | |
| | | | 274-279, 1.05; | CK2_PHOSPHO_SITE 375-378; CK2_PHOSPHO_SITE | |
| | | | 349-375, 1.153; | 71-74; MYRISTYL 341-346; PKC_PHOSPHO_SITE | |
| | | | 225-239, 1.095; | 463-465; AMIDATION 214-217; | |
| | | | 206-212, 1.073; | ASN_GLYCOSYLATION 379-382; | |
| | | | 102-120, 1.266; | CK2_PHOSPHO_SITE 189-192; MYRISTYL 92-97; | |
| | | | 245-253, 1.153; | | |
| | | | 92-98, 1.085; | | |
| | | | 378-386, 1.148; | | |
| | | | 389-420, 1.2; | | |
| | | | 464-469, 1.084; | | |
| | | | 148-166, 1.165; | | |
| | | | 308-314, 1.083; | | |
| | | | 323-341, 1.148; | | |
| | | | 15-67, 1.085; | | |
| DEX0448_033.orf.9 | N | 0 - o1-484; | 260-267, 1.107; | MYRISTYL 94-99; CK2_PHOSPHO_SITE 375-378; | MR_MLE_N 49-180; |
| | | | 349-375, 1.153; | MYRISTYL 339-344; PKC_PHOSPHO_SITE 244-246; | MR_MLE 217-468; |
| | | | 15-67, 1.085; | MYRISTYL 341-346; MYRISTYL 89-94; | MR_MLE_2 288-319; |
| | | | 185-194, 1.167; | ASN_GLYCOSYLATION 379-382; | |
| | | | 225-239, 1.095; | CK2_PHOSPHO_SITE 189-192; MYRISTYL 14-19; | |
| | | | 175-182, 1.165; | PKC_PHOSPHO_SITE 370-372; CK2_PHOSPHO_SITE | |
| | | | 274-279, 1.05; | 320-323; AMIDATION 1-4; MYRISTYL 92-97; | |
| | | | 475-481, 1.1; | AMIDATION 7-10; PKC_PHOSPHO_SITE 463-465; | |
| | | | 102-120, 1.266; | CK2_PHOSPHO_SITE 84-87; CK2_PHOSPHO_SITE | |
| | | | 378-386, 1.148; | 201-204; AMIDATION 214-217; MYRISTYL 399-404; | |
| | | | 92-98, 1.085; | CK2_PHOSPHO_SITE 71-74; | |
| | | | 206-212, 1.073; | CK2_PHOSPHO_SITE 321-324; | |
| | | | 148-166, 1.165; | | |
| | | | 323-341, 1.148, | | |
| | | | 123-129, 1.054; | | |
| | | | 75-84, 1.175; | | |
| | | | 422-448, 1.166; | | |
| | | | 245-253, 1.153; | | |
| | | | 464-469, 1.084; | | |
| | | | 389-420, 1.2; | | |
| | | | 308-314, 1.083; | | |
| DEX0448_033.orf.10 | N | 0 - o1-484; | 422-448, 1.166; | MYRISTYL 92-97; AMIDATION 7-10; MYRISTYL | MR_MLE 217-468; |
| | | | 349-375, 1.153; | 341-346; PKC_PHOSPHO_SITE 463-465; | MR_MLE_2 288-319; |
| | | | 308-314, 1.083; | CK2_PHOSPHO_SITE 71-74; MYRISTYL 14-19; | MR_MLE_N 49-180; |
| | | | 15-67, 1.085; | CK2_PHOSPHO_SITE 84-87; CK2_PHOSPHO_SITE | |
| | | | 323-341, 1.148; | 375-378; PKC_PHOSPHO_SITE 370-372; | |
| | | | 75-84, 1.175; | CK2_PHOSPHO_SITE 201-204; AMIDATION 214-217; | |
| | | | 92-98, 1.085; | MYRISTYL 89-94; CK2_PHOSPHO_SITE 320-323; | |
| | | | 378-386, 1.148; | MYRISTYL 339-344; PKC_PHOSPHO_SITE | |
| | | | 389-420, 1.2; | 244-246; AMIDATION 1-4; CK2_PHOSPHO_SITE | |
| | | | 464-469, 1.084; | 189-192; CK2_PHOSPHO_SITE 321-324; | |
| | | | 245-253, 1.153; | ASN_GLYCOSYLATION 379-382; MYRISTYL 399-404; | |
| | | | 206-212, 1.073; | MYRISTYL 94-99; | |
| | | | 225-239, 1.095; | | |
| | | | 102-120, 1.266; | | |
| | | | 185-194, 1.167; | | |
| | | | 175-182, 1.165; | | |
| | | | 260-267, 1.107; | | |
| | | | 274-279, 1.05; | | |
| | | | 148-166, 1.165; | | |
| | | | 475-481, 1.1; | | |
| | | | 123-129, 1.054; | | |
| DEX0448_034.aa.1 | Y | 0 - o1-138; | 34-47, 1.124; | MYRISTYL 115-120; PKC_PHOSPHO_SITE 133-135; | Ribosomal_S17e 5-125; |
| | | | 54-62, 1.107; | PKC_PHOSPHO_SITE 73-75; | RIBOSOMAL_S17E |
| | | | 117-125, 1.1; | CK2_PHOSPHO_SITE 92-95; PKC_PHOSPHO_SITE | 44-59; |
| | | | 88-102, 1.144; | 46-48; MYRISTYL 13-18; PKC_PHOSPHO_SITE | |
| | | | 109-115, 1.085; | 33-35; | |
| | | | 4-26, 1.154; 69-76, | | |
| | | | 1.073; | | |
| DEX0448_035.aa.1 | N | 0 - o1-386; | 36-45, 1.073; | PKC_PHOSPHO_SITE 32-34; CK2_PHOSPHO_SITE | MEVGALKINASE 320-337; |
| | | | 238-244, 1.063; | 140-143; ASN_GLYCOSYLATION 322-325; | MEVGALKINASE |
| | | | 283-295, 1.148; | CK2_PHOSPHO_SITE 281-284; PKC_PHOSPHO_SITE | 174-196; |
| | | | 115-138, 1.126; | 112-114; MYRISTYL 183-188; | PRICHEXTENSN 119-136; |
| | | | 214-226, 1.133; | CK2_PHOSPHO_SITE 336-339; CK2_PHOSPHO_SITE | PRICHEXTENSN |
| | | | 187-196, 1.129; | 64-67; MYRISTYL 51-56; MYRISTYL 195-200; | 83-104; |
| | | | 307-316, 1.067; | MYRISTYL 79-84; MYRISTYL 320-325; | PRICHEXTENSN 151-176; |
| | | | 158-169, 1.16; | PKC_PHOSPHO_SITE 281-283; | PRICHEXTENSN |
| | | | 84-101, 1.104; | ASN_GLYCOSYLATION 170-173; MYRISTYL 107-112; | 49-61; |
| | | | 25-33, 1.089; | MYRISTYL 263-268; PKC_PHOSPHO_SITE | |
| | | | 198-204, 1.049; | 64-66; CK2_PHOSPHO_SITE 381-384; MYRISTYL | |
| | | | 346-383, 1.206; | 323-328; | |
| | | | 174-183, 1.094; | | |
| | | | 50-78, 1.102; | | |
| | | | 10-20, 1.2; 247-254; | | |
| | | | 1.034; | | |
| DEX0448_035.aa.4 | N | 0 - o1-492; | 36-45, 1.073; | CK2_PHOSPHO_SITE 374-377; PKC_PHOSPHO_SITE | PRICHEXTENSN 352-364; |
| | | | 238-244, 1.063; | 64-66; CK2_PHOSPHO_SITE 140-143; | 364; PRICHEXTENSN |
| | | | 115-138, 1.126; | CK2_PHOSPHO_SITE 281-284; PKC_PHOSPHO_SITE | 364-385; |
| | | | 477-489, 1.11; | 32-34; CK2_PHOSPHO_SITE 343-346; MYRISTYL | PRICHEXTENSN 314-326; |
| | | | 50-78, 1.102; | 398-403; CK2_PHOSPHO_SITE 488-491; | |
| | | | 440-449, 1.068; | CK2_PHOSPHO_SITE 64-67; MYRISTYL 51-56; | |
| | | | 10-20, 1.2; 84-101, | MYRISTYL 397-402; PKC_PHOSPHO_SITE 438-440; | |
| | | | 1.104; 158-169, | PKC_PHOSPHO_SITE 281-283; MYRISTYL | |
| | | | 1.16; 247-254, | 195-200; PKC_PHOSPHO_SITE 434-436; | |
| | | | 1.034; 198-204, | MYRISTYL 183-188; MYRISTYL 107-112; | |
| | | | 1.049; 174-183, | PKC_PHOSPHO_SITE 112-114; | |
| | | | 1.094; 214-226, | ASN_GLYCOSYLATION 371-374; MYRISTYL 79-84; | |
| | | | 1.133; 25-33, | PKC_PHOSPHO_SITE 370-372; | |
| | | | 1.089; 429-438, | ASN_GLYCOSYLATION 170-173; | |
| | | | 1.123; 457-474, | CAMP_PHOSPHO_SITE 318-321; | |
| | | | 1.129; 283-295, | PKC_PHOSPHO_SITE 314-316; MYRISTYL 263-268; | |
| | | | 1.148; 307-314, | | |
| | | | 1.114; 356-367, | | |
| | | | 1.106; 405-422, | | |
| | | | 1.132; 386-394, | | |
| | | | 1.175; 187-196, | | |
| | | | 1.129; | | |
| DEX0448_036.aa.1 | N | 0 - o1-358; | 337-355, 1.182; | CAMP_PHOSPHO_SITE 130-133; | D_2_HYDROXYACID_DH_1 |
| | | | 34-46, 1.187; | CK2_PHOSPHO_SITE 113-116; CK2_PHOSPHO_SITE | 166-193; 2- |
| | | | 80-88, 1.119; | 211-214; MYRISTYL 199-204; | Hacid_DH 18-111; 2- |
| | | | 233-239, 1.061; | PKC_PHOSPHO_SITE 240-242; CK2_PHOSPHO_SITE | Hacid_DH_C 113-304; |
| | | | 52-69, 1.095; | 98-101; PKC_PHOSPHO_SITE 329-331; | |
| | | | 120-129, 1.171; | CK2_PHOSPHO_SITE 47-50; CK2_PHOSPHO_SITE | |
| | | | 186-199, 1.139; | 71-74; PKC_PHOSPHO_SITE 253-255; MYRISTYL | |
| | | | 145-158, 1.116; | 175-180; CK2_PHOSPHO_SITE 89-92; | |
| | | | 166-183, 1.148; | PKC_PHOSPHO_SITE 335-337; MYRISTYL 103-108; | |
| | | | 134-139, 1.069; | | |
| | | | 259-268, 1.091; | | |
| | | | 13-32, 1.162; | | |
| | | | 286-311, 1.137; | | |
| | | | 275-283, 1.087; | | |
| | | | 101-115, 1.176; | | |
| | | | 201-229, 1.192; | | |
| | | | 248-253, 1.079; | | |
| DEX0448_036.aa.2 | N | 0 - o1-364; | 241-268, 1.191; | MYRISTYL 354-359; MYRISTYL 227-232; | |
| | | | 74-91, 1.116; | CK2_PHOSPHO_SITE 10-13; MYRISTYL 317-322; | |
| | | | 39-47, 1.064; | MYRISTYL 339-344; MYRISTYL 6-11; | |
| | | | 93-107, 1.148; | PKC_PHOSPHO_SITE 191-193; PKC_PHOSPHO_SITE | |
| | | | 313-334, 1.258; | 281-283; PKC_PHOSPHO_SITE 197-199; | |
| | | | 287-302, 1.122; | MYRISTYL 233-238; PKC_PHOSPHO_SITE 234-236; | |
| | | | 341-361, 1.292; | MYRISTYL 309-314; | |
| | | | 271-280, 1.125; | | |
| | | | 12-23, 1.136; | | |
| | | | 217-224, 1.157; | | |
| | | | 195-205, 1.103; | | |
| | | | 207-212, 1.058; | | |
| | | | 25-33, 1.074; | | |
| | | | 58-66, 1.119; 4-10, | | |
| | | | 1.027; 137-173, | | |
| | | | 1.158; 122-134, | | |
| | | | 1.126; | | |
| DEX0448_036.orf.2 | N | 0 - o1-192; | 38-74, 1.158; | MYRISTYL 12-17; MYRISTYL 23-28; MYRISTYL | PRICHEXTENSN 165-177; |
| | | | 108-113, 1.058; | 151-156; PKC_PHOSPHO_SITE 92-94; MYRISTYL | PRICHEXTENSN |
| | | | 118-125, 1.157; | 139-144; PKC_PHOSPHO_SITE 98-100; | 18-30; |
| | | | 27-35, 1.076; | PKC_PHOSPHO_SITE 178-180; MYRISTYL 144-149; | |
| | | | 131-182, 1.151; | | |
| | | | 11-17, 1.091; | | |
| | | | 96-106, 1.103; | | |
| DEX0448_036.aa.3 | N | 0 - o1-178; | 101-116, 1.122; | MYRISTYL 168-173; MYRISTYL 41-46; | |
| | | | 31-38, 1.157; | PKC_PHOSPHO_SITE 95-97; MYRISTYL 153-158; | |
| | | | 55-82, 1.191; | MYRISTYL 131-136; PKC_PHOSPHO_SITE 48-50; | |
| | | | 127-148, 1.258; | MYRISTYL 123-128; MYRISTYL 47-52; | |
| | | | 155-175, 1.292; | | |
| | | | 6-27, 1.137; 85-94, | | |
| | | | 1.125; | | |
| DEX0448_036.orf.3 | N | 0 - o1-162; | 18-28, 1.103; | MYRISTYL 107-112; PKC_PHOSPHO_SITE 32-34; | |
| | | | 39-66, 1.191; | MYRISTYL 115-120; PKC_PHOSPHO_SITE 79-81; | |
| | | | 69-78, 1.125; | MYRISTYL 137-142; MYRISTYL 152-157; | |
| | | | 139-159, 1.292; | MYRISTYL 27-32; MYRISTYL 31-36; | |
| | | | 85-100, 1.122; | | |
| | | | 111-132, 1.258; | | |
| DEX0448_037.aa.1. | N | 3 - o1-97; | 189-215, 1.126; | PKC_PHOSPHO_SITE 235-237; MYRISTYL 62-67; | GLY_RICH 4-66; |
| | | tm98-120; | 235-269, 1.226; | CK2_PHOSPHO_SITE 185-188; MYRISTYL 38-43; | TMFOUR 94-120; |
| | | i121-126; | 56-74, 1.194; | MYRISTYL 12-17, MYRISTYL 128-133; | TM4_1 105-127; |
| | | tm127-149; | 156-174, 1.168; | ASN_GLYCOSYLATION 268-271; MYRISTYL 28-33; | TMFOUR 121-149; |
| | | o150-239; | 223-233, 1.072; | MYRISTYL 26-31; MYRISTYL 15-20; MYRISTYL | transmembrane4 45-252; |
| | | tm240-262; | 92-120, 1.188; | 115-120; MYRISTYL 34-39; MYRISTYL 265-270; | TM4_2 56-269; |
| | | i263-272; | 179-187, 1.124; | | TMFOUR 240-266; |
| | | | 4-12, 1.15; 78-86, | | |
| | | | 1.127; 122-149, | | |
| | | | 1.229; | | |
| DEX0448_037.aa.2 | N | 3 - o1-128; | 91-105, 1.194; | MYRISTYL 93-98; MYRISTYL 146-151; MYRISTYL | TMFOUR 125-151; |
| | | tm129-151; | 123-151, 1.188; | 13-18; MYRISTYL 3-8; PKC_PHOSPHO_SITE 266-268; | transmembrane4 90-283; |
| | | i152-157; | 28-36, 1.085; | CK2_PHOSPHO_SITE 86-89; MYRISTYL 159-164; | TMFOUR 271-297; |
| | | tm158-180; | 266-300, 1.226; | ASN_GLYCOSYLATION 299-302; MYRISTYL | TMFOUR 152-180; |
| | | o181-270; | 74-84, 1.108; | 296-301; CK2_PHOSPHO_SITE 216-219; | TM4_2 90-300; |
| | | tm271-293; | 44-50, 1.041; | | TM4_1 136-158; |
| | | i294-303; | 55-66, 1.285; | | |
| | | | 109-117, 1.127; | | |
| | | | 210-218, 1.124, | | |
| | | | 220-246, 1.126; | | |
| | | | 254-264, 1.072; | | |
| | | | 153-180, 1.229; | | |
| | | | 187-205, 1.168; | | |
| | | | 4-22, 1.198; | | |
| DEX0448_037.aa.3 | N | 3 - o1-245; | 57-63, 1.102; | MYRISTYL 28-33; MYRISTYL 276-281; | TM4_1 253-275; |
| | | tm246-268; | 146-160, 1.137; | PKC_PHOSPHO_SITE 117-119; MYRISTYL 263-268; | TMFOUR 388-414; |
| | | i269-274; | 190-208, 1.221; | PKC_PHOSPHO_SITE 383-385; MYRISTYL | transmembrane4 225-400; |
| | | tm275-297; | 28-51, 1.074; | 229-234; MYRISTYL 226-231; MYRISTYL 137-142; | TM4_2 247-417; |
| | | o298-387; | 337-363, 1.126; | MYRISTYL 413-418; ASN_GLYCOSYLATION | TMFOUR 269-297; |
| | | tm388-410; | 224-268, 1.188; | 416-419; CK2_PHOSPHO_SITE 150-153; | TMFOUR 242-268; |
| | | i411-420; | 304-322, 1.168; | CK2_PHOSPHO_SITE 333-336; MYRISTYL 9-14; | |
| | | | 121-127, 1.055; | CK2_PHOSPHO_SITE 161-164; MYRISTYL 6-11; | |
| | | | 162-181, 1.262; | ASN_GLYCOSYLATION 55-58; | |
| | | | 13-25, 1.066; | | |
| | | | 383-417, 1.226; | | |
| | | | 371-381, 1.072; | | |
| | | | 72-78, 1.077; | | |
| | | | 327-335, 1.124 | | |
| | | | 132-139, 1.09; | | |
| | | | 270-297, 1.229; | | |
| | | | 82-118, 1.227; | | |
| DEX0448_037.orf.3 | N | 3 - o1-72; | 198-208, 1.072; | PKC_PHOSPHO_SITE 210-212; MYRISTYL 90-95; | TM4_1 80-102; |
| | | tm73-95; | 17-35, 1.221; | CK2_PHOSPHO_SITE 160-163; MYRISTYL 53-58; | transmembrane4 52-227; |
| | | i96-101; | 131-149, 1.168; | MYRISTYL 240-245; MYRISTYL 56-61; MYRISTYL | TM4_2 74-244; |
| | | tm102-124; | 154-162, 1.124; | 103-108; ASN_GLYCOSYLATION 243-246; | TMFOUR 215-241; |
| | | o125-214; | 97-124, 1.229; | | TMFOUR 96-124; |
| | | tm215-237; | 51-95, 1.188; | | TMFOUR 69-95; |
| | | i238-247; | 210-244, 1.226; | | |
| | | | 164-190, 1.126; | | |
| DEX0448_037.aa.4 | Y | 4 - i1-12; | 120-138, 1.168; | CK2_PHOSPHO_SITE 149-152; PKC_PHOSPHO_SITE | TMFOUR 85-113; |
| | | tm13-35; | 199-233, 1.226; | 199-201; MYRISTYL 92-97; MYRISTYL 26-31; | TM4_2 4-233; TM4_1 |
| | | o36-61; | 4-38; 1.194; | ASN_GLYCOSYLATION 232-235; MYRISTYL 229-234; | 69-91; |
| | | tm62-84; | 153-179, 1.126; | MYRISTYL 5-10; MYRISTYL 2-7; MYRISTYL | transmembrane4 9-216; |
| | | i85-90; | 143-151, 1.124; | 79-84; | TMFOUR 204-230; |
| | | tm91-113; | 42-50, 1.127; | | TMFOUR 12-35; |
| | | o114-203; | 56-84, 1.188; | | TMFOUR 58-84; |
| | | tm204-226; | 86-113, 1.229; | | |
| | | i227-236; | 187-197, 1.072; | | |
| DEX0448_037.aa.5 | Y | 4 - i1-12; | 42-50, 1.127; | PKC_PHOSPHO_SITE 239-241; MYRISTYL 92-97; | TMFOUR 204-230; |
| | | tm13-35; | 227-239, 1.165; | CK2_PHOSPHO_SITE 149-152; MYRISTYL 79-84; | TM4_1 69-91; TMFOUR |
| | | o36-61; | 199-225, 1.226; | PKC_PHOSPHO_SITE 199-201; MYRISTYL 26-31; | 58-84; TMFOUR 12-35; |
| | | tm62-84; | 120-138, 1.168; | MYRISTYL 2-7; MYRISTYL 5-10; | TMFOUR 85-113; |
| | | i85-90; | 86-113, 1.229; | | transmembrane4 9-216; |
| | | tm91-113; | 143-151, 1.124; | | TM4_2 4-226; |
| | | o114-203; | 4-38, 1.194; | | |
| | | tm204-226; | 187-197, 1.072; | | |
| | | i227-256; | 56-84, 1.188; | | |
| | | | 153-179, 1.126; | | |
| DEX0448_037.aa.6 | Y | 3 - i1-12; | 4-38, 1.194; | PKC_PHOSPHO_SITE 199-201; MYRISTYL 26-31; | transmembrane4 9-209; |
| | | tm13-35; | 187-197, 1.072; | MYRISTYL 79-84; MYRISTYL 92-97; | TMFOUR 85-113; |
| | | o36-59; | 56-84, 1.188; | PKC_PHOSPHO_SITE 208-210; MYRISTYL 5-10; | TM4_2 4-210; TMFOUR |
| | | tm60-82; | 120-138, 1.168; | MYRISTYL 2-7; CK2_PHOSPHO_SITE 149-152; | 12-35; TMFOUR 58-84; |
| | | i83-88; | 153-179, 1.126; | | TM4_1 69-91; |
| | | tm89-111; | 86-113, 1.229; | | |
| | | o112-210; | 42-50, 1.127; | | |
| | | | 143-151, 1.124; | | |
| | | | 199-207, 1.09; | | |
| DEX0448_038.aa.1 | N | 0 - o1-58; | 4-16, 1.116; 21-30, | PKC_PHOSPHO_SITE 51-53; | sp_P04818_TYSY_HUMAN |
| | | | 1.102; | | 1-58; |
| DEX0448_038.orf.1 | N | 0 - o1-91; | 60-80, 1.193; | PKC_PHOSPHO_SITE 34-36; PKC_PHOSPHO_SITE | |
| | | | 42-49, 1.089; | 40-42; PKC_PHOSPHO_SITE 29-31; | |
| | | | 51-58, 1.113; | | |
| DEX0448_039.aa.1 | N | 0 - o1-86; | 67-79, 1.076; 7-19, | PKC_PHOSPHO_SITE 73-75; CK2_PHOSPHO_SITE | |
| | | | 1.134; 36-49; | 15-18; CK2_PHOSPHO_SITE 74-77; | |
| | | | 1.1; | ASN_GLYCOSYLATION 57-60; PKC_PHOSPHO_SITE | |
| | | | | 15-17; CK2_PHOSPHO_SITE 47-50; | |
| | | | | CK2_PHOSPHO_SITE 4-7; CAMP_PHOSPHO_SITE | |
| | | | | 67-70; | |
| DEX0448_040.aa.1 | N | 0 - o1-107; | 40-46, 1.08; 59-78, | ASN_GLYCOSYLATION 96-99; PKC_PHOSPHO_SITE | |
| | | | 1.174; 4-28, | 25-27; PKC_PHOSPHO_SITE 36-38; MYRISTYL | |
| | | | 1.134; 52-57, | 49-54; CK2_PHOSPHO_SITE 36-39; | |
| | | | 1.069; | | |
| DEX0448_040.orf.1 | Y | 0 - i1-90; | 42-61, 1.174; | ASN_GLYCOSYLATION 79-82; CK2_PHOSPHO_SITE | |
| | | | 23-29, 1.08; 35-40, | 19-22; MYRISTYL 32-37; PKC_PHOSPHO_SITE | |
| | | | 1.069; 4-15, | 19-21; MYRISTYL 5-10; | |
| | | | 1.154; | | |
| DEX0448_040.aa.2 | Y | 0 - o1-193; | 126-132, 1.08; | MYRISTYL 61-66; CK2_PHOSPHO_SITE 51-54; | |
| | | | 59-79, 1.208; | MYRISTYL 87-92; CK2_PHOSPHO_SITE 50-53; | |
| | | | 95-102, 1.07; | MYRISTYL 135-140; PKC_PHOSPHO_SITE 122-124; | |
| | | | 104-114, 1.156; | CK2_PHOSPHO_SITE 122-125; | |
| | | | 138-143, 1.069; | ASN_GLYCOSYLATION 182-185; MYRISTYL 7-12; | |
| | | | 20-33, 1.175; | | |
| | | | 145-164, 1.174; | | |
| | | | 83-88, 1.089; | | |
| DEX0448_040.orf.2 | Y | 0 - o1-189; | 79-84, 1.089; | CK2_PHOSPHO_SITE 118-121; MYRISTYL 83-88; | |
| | | | 16-29, 1.175; | CK2_PHOSPHO_SITE 46-49; CK2_PHOSPHO_SITE | |
| | | | 134-139, 1.069; | 47-50; PKC_PHOSPHO_SITE 118-120; MYRISTYL | |
| | | | 55-75, 1.208; | 57-62; MYRISTYL 131-136; ASN_GLYCOSYLATION | |
| | | | 122-128, 1.08; | 178-181; | |
| | | | 91-98, 1.07; | | |
| | | | 100-110, 1.156; | | |
| | | | 141-160, 1.174; | | |
| DEX0448_040.aa.3 | Y | 0 - o1-202; | 104-111, 1.07; | CK2_PHOSPHO_SITE 131-134; CK2_PHOSPHO_SITE | |
| | | | 135-141, 1.08; | 59-62; ASN_GLYCOSYLATION 191-194; MYRISTYL | |
| | | | 113-123, 1.156; | 96-101; MYRISTYL 70-75; PKC_PHOSPHO_SITE | |
| | | | 92-97, 1.089; | 131-133; MYRISTYL 144-149; | |
| | | | 154-173, 1.174; | PKC_PHOSPHO_SITE 13-15; PKC_PHOSPHO_SITE | |
| | | | 68-88, 1.208; | 14-16; CK2_PHOSPHO_SITE 60-63; | |
| | | | 29-42, 1.175; | | |
| | | | 147-152, 1.069; | | |
| DEX0448_040.orf.3 | Y | 0 - o1-208; | 141-147, 1.08; | MYRISTYL 8-13; CK2_PHOSPHO_SITE 24-27; | |
| | | | 98-103, 1.089; | PKC_PHOSPHO_SITE 137-139; MYRISTYL 12-17; | |
| | | | 74-94, 1.208; | CK2_PHOSPHO_SITE 65-68; MYRISTYL 76-81; | |
| | | | 35-48, 1.175; | MYRISTYL 150-155; MYRISTYL 16-21; | |
| | | | 153-158, 1.069; | ASN_GLYCOSYLATION 197-200; | |
| | | | 110-117, 1.07; | CK2_PHOSPHO_SITE 66-69; MYRISTYL 102-107; | |
| | | | 119-129, 1.156; | CK2_PHOSPHO_SITE 137-140; | |
| | | | 4-9, 1.101; 160-179, | | |
| | | | 1.174; | | |
| DEX0448_040.aa.4 | Y | 1 - i1-11; | 79-84, 1.089; | PKC_PHOSPHO_SITE 118-120; MYRISTYL 83-88; | |
| | | tm12-34; | 16-29, 1.182; | ASN_GLYCOSYLATION 178-181; | |
| | | o35-189; | 134-139, 1.069; | CK2_PHOSPHO_SITE 7-10; MYRISTYL 57-62; | |
| | | | 141-160, 1.174; | CK2_PHOSPHO_SITE 47-50; CK2_PHOSPHO_SITE | |
| | | | 91-98, 1.07; 55-75, | 118-121; CK2_PHOSPHO_SITE 46-49; MYRISTYL | |
| | | | 1.208; 122-128, | 131-136; | |
| | | | 1.08; 100-110, | | |
| | | | 1.156; | | |
| DEX0448_040.aa.5 | N | 0 - o1-171; | 116-121, 1.069; | CK2_PHOSPHO_SITE 29-32; MYRISTYL 39-44; | |
| | | | 104-110, 1.08; | MYRISTYL 12-17; CK2_PHOSPHO_SITE 100-103; | |
| | | | 61-66, 1.089; | ASN_GLYCOSYLATION 160-163; | |
| | | | 123-142, 1.174; | PKC_PHOSPHO_SITE 100-102; CK2_PHOSPHO_SITE | |
| | | | 82-92, 1.156; | 28-31; MYRISTYL 65-70; MYRISTYL 113-118; | |
| | | | 37-57, 1.208; | | |
| | | | 12-17, 1.061; | | |
| | | | 73-80, 1.07; | | |
| DEX0448_040.orf.5 | N | 0 - o1-171; | | CK2_PHOSPHO_SITE 29-32; MYRISTYL 65-70; | |
| | | | | ASN_GLYCOSYLATION 160-163; | |
| | | | | PKC_PHOSPHO_SITE 100-102; MYRISTYL 39-44; | |
| | | | | CK2_PHOSPHO_SITE 100-103; MYRISTYL 12-17; | |
| | | | | CK2_PHOSPHO_SITE 28-31; MYRISTYL 113-118; | |
| DEX0448_040.aa.6 | N | 0 - o1-156; | 29-42, 1.16; 89-95, | PKC_PHOSPHO_SITE 28-30; MYRISTYL 50-55; | |
| | | | 1.08; 108-127, | PKC_PHOSPHO_SITE 85-87; CK2_PHOSPHO_SITE | |
| | | | 1.174; 67-77, | 85-88; ASN_GLYCOSYLATION 145-148; MYRISTYL | |
| | | | 1.56; 58-65, | 98-103; | |
| | | | 1.07; 46-51, | | |
| | | | 1.089; 101-106, | | |
| | | | 1.069; 17-24, | | |
| | | | 1.085; | | |
| DEX0448_040.orf.6 | N | 0 - o1-156; | 108-127, 1.174; | MYRISTYL 98-103; PKC_PHOSPHO_SITE 26-28; | |
| | | | 17-24, 1.08; 4-9, | MYRISTYL 50-55; MYRISTYL 13-18; | |
| | | | 1.156; 67-77, | PKC_PHOSPHO_SITE 85-87; ASN_GLYCOSYLATION | |
| | | | 1.156; 58-65, | 145-148; CK2_PHOSPHO_SITE 85-88; AMIDATION | |
| | | | 1.07; 101-106, | 8-11; | |
| | | | 1.069; 89-95, | | |
| | | | 1.08; 46-51, | | |
| | | | 1.089; 29-42, | | |
| | | | 1.198; | | |
| DEX0448_040.aa.7 | N | 0 - i1-76; | 28-47, 1.174; 9-15, | MYRISTYL 18-23; PKC_PHOSPHO_SITE 5-7; | |
| | | | 1.08; 21-26, | CK2_PHOSPHO_SITE 5-8; ASN_GLYCOSYLATION | |
| | | | 1.069; | 65-68; | |
| DEX0448_040.aa.7 | N | 0 - o1-139; | 65-85, 1.137; | PKC_PHOSPHO_SITE 44-46; PKC_PHOSPHO_SITE | |
| | | | 127-136, 1.186; | 126-128; CK2_PHOSPHO_SITE 134-137; | |
| | | | 31-42, 1.12; 97-122, | MYRISTYL 62-67; PKC_PHOSPHO_SITE 25-27; | |
| | | | 1.182; 48-62, | MYRISTYL 4-9; CK2_PHOSPHO_SITE 11-14; | |
| | | | 1.098; 12-29, | | |
| | | | 1.167; | | |
| DEX0448_040.aa.1 | N | 0 - o1-568; | 349-355, 1.061; | CK2_PHOSPHO_SITE 356-359; MYRISTYL 300-305; | RRM RNP 1 429-436; |
| | | | 17-23, 1.06; | AMIDATION 122-125; MYRISTYL 475-480; | LYS_RICH 51-142; |
| | | | 457-464, 1.094; | ASN_GLYCOSYLATION 317-320; | HISTONEH5 67-86; |
| | | | 524-531, 1.068; | CK2_PHOSPHO_SITE 319-322; CK2_PHOSPHO_SITE | HISTONEH5 45-62; |
| | | | 115-122, 1.095; | 206-209; CK2_PHOSPHO_SITE 386-389; | rrm 395-461; RRM_2 |
| | | | 90-107, 1.114; | PKC_PHOSPHO_SITE 69-71; MYRISTYL 133-138; | 393-466; RRM_3 486-560; |
| | | | 320-344, 1.172; | CK2_PHOSPHO_SITE 145-148; CK2_PHOSPHO_SITE | RRM 487-556; |
| | | | 306-314, 1.081; | 438-441; CK2_PHOSPHO_SITE 42-45; | rrm 309-378; |
| | | | 502-517, 1.085; | CK2_PHOSPHO_SITE 496-499; AMIDATION 217-220; | GLU_RICH 143-275; |
| | | | 221-232, 1.182; | CK2_PHOSPHO_SITE 452-455; AMIDATION | RRM_RNP_1 523-530; |
| | | | 126-132, 1.03; | 277-280; CK2_PHOSPHO_SITE 34-37; | RRM 308-379; RRM_1 |
| | | | 409-416, 1.032; | CK2_PHOSPHO_SITE 41-44; CK2_PHOSPHO_SITE | 307-383; ASP_RICH |
| | | | 360-375, 1.098; | 445-448; CK2_PHOSPHO_SITE 501-504; | 144-261; RRM 394-462; |
| | | | 418-425, 1.091; | PKC_PHOSPHO_SITE 346-348; AMIDATION 107-110; | rrm 488-555; |
| | | | 486-497, 1.133; | CK2_PHOSPHO_SITE 28-31; | HISTONEH5 9-23; |
| | | | 430-436, 1.057; | CK2_PHOSPHO_SITE 153-156; | |
| | | | 44-51, 1.122; | ASN_GLYCOSYLATION 478-481; | |
| | | | 57-86, 1.155; | CK2_PHOSPHO_SITE 405-408; AMIDATION 52-55; | |
| | | | 171-183, 1.064; | PKC_PHOSPHO_SITE 386-388; MYRISTYL 111-116; | |
| | | | 552-558, 1.032; | CK2_PHOSPHO_SITE 184-187; | |
| | | | 393-407, 1.102; | PKC_PHOSPHO_SITE 60-62; ASN_GLYCOSYLATION | |
| | | | 287-293, 1.019; | 492-495; CK2_PHOSPHO_SITE 532-535; | |
| | | | | AMIDATION 85-88; | |
| DEX0448_041.aa.2 | N | 0 - o1-520; | 409-416, 1.032; | CK2_PHOSPHO_SITE 496-499; MYRISTYL 111-116; | ASP_RICH 144-261; |
| | | | 17-23, 1.06; | CK2_PHOSPHO_SITE 206-209; | RRM 308-379; |
| | | | 287-293, 1.019; | CK2_PHOSPHO_SITE 34-37; MYRISTYL 133-138; | HISTONEH5 9-23; rrm |
| | | | 320-344, 1.172; | CK2_PHOSPHO_SITE 41-44; CK2_PHOSPHO_SITE | 309-378; HISTONEH5 |
| | | | 349-355, 1.061; | 438-441; ASN_GLYCOSYLATION 478-481; | 67-86; LYS_RICH 51-142; |
| | | | 502-517, 1.085; | MYRISTYL 475-480; CK2_PHOSPHO_SITE 145-148; | RRM_2 393-466; |
| | | | 44-51, 1.122; | PKC_PHOSPHO_SITE 69-71; | GLU_RICH 143-275; |
| | | | 126-132, 1.03; | CK2_PHOSPHO_SITE 445-448; PKC_PHOSPHO_SITE | rrm 395-461; RRM_1 |
| | | | 486-497, 1.133; | 60-62; ASN_GLYCOSYLATION 492-495; | 307-383; RRM_RNP_1 |
| | | | 171-183, 1.064; | CK2_PHOSPHO_SITE 501-504; CK2_PHOSPHO_SITE | 429-436; HISTONEH5 |
| | | | 418-425, 1.091; | 28-31; MYRISTYL 300-305; CK2_PHOSPHO_SITE | 45-62; RRM 394-462; |
| | | | 115-122, 1.095; | 356-359; AMIDATION 217-220; | |
| | | | 393-407, 1.102; | PKC_PHOSPHO_SITE 386-388; PKC_PHOSPHO_SITE | |
| | | | 360-375, 1.098; | 346-348; CK2_PHOSPHO_SITE 452-455; | |
| | | | 221-232, 1.182; | AMIDATION 107-110; ASN GLYCOSYLATION 317-320; | |
| | | | 306-314, 1.081; | AMIDATION 277-280; CK2_PHOSPHO_SITE | |
| | | | 457-464, 1.094; | 386-389; CK2_PHOSPHO_SITE 405-408; | |
| | | | 430-436, 1.057; | AMIDATION 85-88; AMIDATION 52-55; | |
| | | | 57-86, 1.155; | CK2_PHOSPHO_SITE 153-156; CK2_PHOSPHO_SITE | |
| | | | 90-107, 1.114; | 184-187; CK2_PHOSPHO_SITE 319-322; | |
| | | | | AMIDATION 122-125; CK2_PHOSPHO_SITE 42-45; | |
| DEX0448_042.aa.1 | N | 0 - o1-526; | 433-454, 1.202; | MYRISTYL 77-82; CK2_PHOSPHO_SITE 497-500; | CHAPERONIN60 107-134; |
| | | | 116-122, 1.114; | CAMP_PHOSPHO_SITE 249-252; MYRISTYL 143-148; | CHAPERONIN60 |
| | | | 27-33, 1.061; | AMIDATION 193-196; PKC_PHOSPHO_SITE | 423-444; cpn60_TCP1 |
| | | | 168-174, 1.106; | 200-202; PKC_PHOSPHO_SITE 70-72; | 47-526; |
| | | | 486-494, 1.129; | CK2_PHOSPHO_SITE 351-354; CK2_PHOSPHO_SITE | CHAPERONIN60 51-77; |
| | | | 36-55, 1.153; | 105-108; MYRISTYL 329-334; | CHAPERONIN60 375-400; |
| | | | 10-25, 1.147; | CK2_PHOSPHO_SITE 381-384; PKC_PHOSPHO_SITE | TCOMPLEXTCP1 |
| | | | 498-504, 1.044; | 471-473; MYRISTYL 484-489; | 403-425; |
| | | | 143-156, 1.166; | CK2_PHOSPHO_SITE 206-209; MYRISTYL 439-444; | TCOMPLEXTCP1 105-124; |
| | | | 158-165, 1.039; | ASN_GLYCOSYLATION 230-233; | TCOMPLEXTCP1 |
| | | | 234-249, 1.141; | CK2_PHOSPHO_SITE 163-166; MYRISTYL 183-188; | 71-89; TCOMPLEXTCP1 |
| | | | 331-352, 1.137; | CK2_PHOSPHO_SITE 164-167; | 436-448; |
| | | | 468-478, 1.035; | ASN_GLYCOSYLATION 103-106; | CHAPERONINS_CPN60 |
| | | | 372-383, 1.096; | CK2_PHOSPHO_SITE 200-203; | 430-441; |
| | | | 95-101, 1.127; | ASN_GLYCOSYLATION 426-429; | CHAPERONIN60 292-315; |
| | | | 268-277, 1.142; | CK2_PHOSPHO_SITE 410-413; PKC_PHOSPHO_SITE | TCOMPLEXTCP1 |
| | | | 222-230, 1.113; | 231-233; CK2_PHOSPHO_SITE 383-386; | 49-65; |
| | | | 60-65, 1.068; | CAMP_PHOSPHO_SITE 156-159; | |
| | | | 251-264, 1.134; | PKC_PHOSPHO_SITE 247-249; MYRISTYL 435-440; | |
| | | | 283-303, 1.201; | MYRISTYL, 112-117; MYRISTYL 322-327; | |
| | | | 75-87, 1.119; | | |
| | | | 395-407, 1.181; | | |
| DEX0448_043.aa.1 | N | 0 - o1-121; | 60-69, 1.144; | PKC_PHOSPHO_SITE 70-72; CK2_PHOSPHO_SITE | sp_P07355_ANX2_HUMAN |
| | | | 92-118, 1.156; | 39-42; PKC_PHOSPHO_SITE 34-36; | 41-114; ANNEXINII |
| | | | 4-22, 1.179; 27-38 | CK2_PHOSPHO_SITE 88-91; ASN_GLYCOSYLATION | 11-23; annexin 43-111; |
| | | | 1.084; 78-84, | 71-74; CK2_PHOSPHO_SITE 11-14; MYRISTYL | ANNEXINII 96-112; |
| | | | 1.06; | 33-38; PKC_PHOSPHO_SITE 88-90; | ANNEXINII 56-78; |
| | | | | | ANNEXIN 56-78; |
| | | | | | ANNEXIN 96-112; ANX |
| | | | | | 59-111; |
| DEX0448_043.orf.1 | N | 0 - i1-71; | 9-18, 1.144; 41-68, | PKC_PHOSPHO_SITE 37-39; CK2_PHOSPHO_SITE | ANNEXIN 45-61; ANX |
| | | | 1.156; 27-33, | 2-5; CK2_PHOSPHO_SITE 37-40; | 8-60; ANNEXINII 5-27; |
| | | | 1.06; | PKC_PHOSPHO_SITE 19-21; ASN_GLYCOSYLATION | ANNEXINII 45-61; |
| | | | | 20-23; | ANNEXIN 5-27; |
| | | | | | sp_P07355_ANX2_HUMAN |
| | | | | | 7-63; annexin 2-60; |
| | | | | | ANNEXIN 8-60; |
| DEX0448_043.aa.2 | N | 0 - 01-242; | 210-216, 1.075; | CK2_PHOSPHO_SITE 6-9; PKC_PHOSPHO_SITE 26-28; | ANNEXIN 75-97; ANX |
| | | | 234-239, 1.075; | CK2_PHOSPHO_SITE 163-166; MYRISTYL 53-58; | 142-184; ANNEXINII |
| | | | 29-42, 1.179; | PKC_PHOSPHO_SITE 107-109; | 75-97; ANX 78-130; |
| | | | 111-145, 1.156; | CK2_PHOSPHO_SITE 194-197; CK2_PHOSPHO_SITE | sp_Q99KH3_MOUSE |
| | | | 97-103, 1.06; | 173-176; CK2_PHOSPHO_SITE 146-149; | 142-187; |
| | | | 47-58, 1.084; 7-14, | AMIDATION 186-189; PKC_PHOSPHO_SITE 231-233; | sp_P07355_ANX2_HUMAN |
| | | | 1.138; 193-230, | CAMP_PHOSPHO_SITE 218-221; | 61-133; ANNEXINII |
| | | | 1.116; 179-185, | PKC_PHOSPHO_SITE 89-91; ASN_GLYCOSYLATION | 115-131; annexin |
| | | | 1.11; 79-88, | 90-93; CK2_PHOSPHO_SITE 59-62; | 63-130; annexin |
| | | | 1.144; | CK2_PHOSPHO_SITE 107-110; PKC_PHOSPHO_SITE | 135-184; |
| | | | | 54-56; | sp_P07355_ANX2_HUMAN |
| | | | | | 203-235; ANNEXIN |
| | | | | | 78-130; ANNEXIN |
| | | | | | 115-131; ANNEXINII |
| | | | | | 31-43; |
| DEX0448_043.orf.2 | N | 0 - o1-342; | 331-339, 1.188; | MYRISTYL 46-51; AMIDATION 179-182; | ANNEXINI 325-338; |
| | | | 224-224, 1.161; | PKC_PHOSPHO_SITE 221-233; CK2_PHOSPHO_SITE | annexin 56-123; |
| | | | 90-96, 1.06; | 187-190; PKC_PHOSPHO_SITE 82-84; | ANNEXINI 108-124; |
| | | | 288-299, 1.146; | PKC_PHOSPHO_SITE 100-102; CK2_PHOSPHO_SITE | ANNEXINI 281-301; |
| | | | 72-81, 1.144; | 326-329; CK2_PHOSPHO_SITE 100-103; | ANNEXINII 257-264; |
| | | | 315-324, 1.131; | PKC_PHOSPHO_SITE 280-282; CK2_PHOSPHO_SITE | sp_p07355_ANX2_HUMAN |
| | | | 104-138, 1.156; | 299-302; CK2_PHOSPHO_SITE 297-300; | 54-126; ANNEXINII |
| | | | 40-51, 1.084; | PKC_PHOSPHO_SITE 19-21; PKC_PHOSPHO_SITE | 281-301; ANNEXINII |
| | | | 22-35, 1.179; | 246-248; CK2_PHOSPHO_SITE 166-169; | 24-36; ANNEXINII |
| | | | 186-196, 1.116; | ASN_GLYCOSYLATION 83-86; PKC_PHOSPHO_SITE | 325-338; ANNEXINIV |
| | | | 11-18, 1.062; | 47-49; CK2_PHOSPHO_SITE 139-142; | 108-124; ANNEXINV |
| | | | 257-277, 1.177; | CK2_PHOSPHO_SITE 24-27; CK2_PHOSPHO_SITE | 68-90; ANNEXINIV |
| | | | 172-178, 1.11; | 52-55; CAMP_PHOSPHO_SITE 208-211; | 281-307; ANX 71-123; |
| | | | | CK2_PHOSPHO_SITE 239-242; CK2_PHOSPHO_SITE | ANNEXINV 325-338; |
| | | | | 156-159; | ANNEXIN 68-90; |
| | | | | | ANNEXIN 285-337; |
| | | | | | ANNEXIN 108-124; |
| | | | | | annexin 270-337; |
| | | | | | ANNEXIN 71-123; ANX |
| | | | | | 285-337; ANNEXINIV |
| | | | | | 325-338; ANNEXIN |
| | | | | | 325-338; ANNEXIN |
| | | | | | 210-262; ANX 210-262; |
| | | | | | ANNEXINIV 68-90; |
| | | | | | ANNEXINV 108-124; |
| | | | | | sp_Q99KH3_Q99KH3_MOUSE |
| | | | | | 272-340; |
| | | | | | sp_P07355_ANX2_HUMAN |
| | | | | | 196-265; ANNEXINV |
| | | | | | 281-307; annexin |
| | | | | | 128-177; ANNEXINIV |
| | | | | | 43-53; |
| | | | | | sp_Q99KH3_Q99KH3_MOUSE |
| | | | | | 135-180; |
| | | | | | ANNEXINII 201-227; |
| | | | | | ANNEXIN 281-301; |
| | | | | | annexin 194-262; |
| | | | | | ANNEXINI 68-90; ANX |
| | | | | | 135-177; |
| DEX0448_044.aa.1 | Y | 0 - o1-72; | 4-27, 1.179; 47-52, | | |
| | | | 1.073; 29-35, | | |
| | | | 1.043; 57-67, | | |
| | | | 1.134; | | |
| DEX0448_044.orf.1 | Y | 0 - o1-103; | 89-95, 1.083; | PKC_PHOSPHO_SITE 42-44; MYRISTYL 70-75; | sp_Q9BYK1_Q9BYK1_HUMAN |
| | | | 30-43, 1.171; | CAMP_PHOSPHO_SITE 37-40; PKC_PHOSPHO_SITE | 23-70; |
| | | | 55-64, 1.123; | 65-67; MYRISTYL 9-14; | RIBOSOMAL_S21E 33-41; |
| | | | 73-81, 1.126; 4-19, | | Ribosomal_S21e |
| | | | 1.14; | | 23-103; |
| DEX0448_044.orf.2 | Y | 0 - o1-112; | 73-95, 1.144; | MYRISTYL 70-75; PKC_PHOSPHO_SITE 42-44; | sp_Q9BYK1_Q9BYK1_HUMAN |
| | | | 30-43, 1.171; | CAMP_PHOSPHO_SITE 37-40; PKC_PHOSPHO_SITE | 23-70; |
| | | | 100-109, 1.205; | 65-67; MYRISTYL 9-14; MYRISTYL 96-101; | Ribosomal_S21e 23-101; |
| | | | 55-64, 1.123; 4-19, | | RIBOSOMAL_S21E |
| | | | 1.14; | | 33-41; |
| DEX0448_044.aa.3 | Y | 0 - o1-87; | 29-35, 1.08; 70-84, | AMIDATION 64-67; MYRISTYL 7-12; | sp_Q9BYK2_Q9BYK2_HUMAN |
| | | | 1.126; 19-25, | PKC_PHOSPHO_SITE 33-35; MYRISTYL 36-41; | 39-69; |
| | | | 1.06; 54-61, | ASN_GLYCOSYLATION 37-40; MYRISTYL 3-8; | Ribosomal_S21e 35-83; |
| | | | 1.062; 5-13, | MYRISTYL 15-20; PKC_PHOSPHO_SITE 41-43; | |
| | | | 1.128; | MYRISTYL 69-74; MYRISTYL 12-17; | |
| DEX0448_044.orf.3 | Y | 0 - o1-86; | 53-60, 1.062; | CAMP_PHOSPHO_SITE 35-38; AMIDATION 63-66; | sp_Q9BYK2_Q9BYK2_HUMAN |
| | | | 28-41, 1.171; 5-17, | PKC_PHOSPHO_SITE 40-42; MYRISTYL 68-73; | 21-68; |
| | | | 1.128; 69-83, | MYRISTYL 3-8; MYRISTYL 7-12; | Ribosomal_S21e 21-82; |
| | | | 1.126; | | RIBOSOMAL_S21E 31-39; |
| DEX0448_044.aa.4 | N | 0 - i1-77; | 63-69, 1.083; | ASN_GLYCOSYLATION 12-15; MYRISTYL 11-16; | Ribosomal_S21e 10-77; |
| | | | 47-55, 1.126; | PKC_PHOSPHO_SITE 8-10; MYRISTYL 7-12; | sp_Q9BYK1_Q9BYK1_HUMAN |
| | | | 29-38, 1.123; | PKC_PHOSPHO_SITE 39-41; MYRISTYL 44-49; | 14-44; |
| | | | | PKC_PHOSPHO_SITE 16-18; | |
| DEX0448_044.orf.4 | N | 0 - o1-86; | 15-26, 1.119; | PKC_PHOSPHO_SITE 25-27; MYRISTYL 53-58; | Ribosomal_S21e 17-86; |
| | | | 72-78, 1.083; | CAMP_PHOSPHO_SITE 20-23; CK2_PHOSPHO_SITE | sp_Q9BYK1_Q9BYK1_HUMAN |
| | | | 56-64, 1.126; 4-10, | 7-10; PKC_PHOSPHO_SITE 48-50; | 17-53; |
| | | | 1.034; 38-47, | | |
| | | | 1.123; | | |

### Example 1b

### Sequence Alignment Support

[0454] Alignments between previously identified sequences and splice variant sequences are performed to confirm unique portions of splice variant nucleic acid and amino acid sequences. The alignments are done using the Needle program in the European Molecular Biology Open Software Suite (EMBOSS) version 2.2.0 available at www.emboss.org from EMBnet (http://www.embnet.org). Default settings are used unless otherwise noted. The Needle program in EMBOSS implements the Needleman-Wunsch algorithm. Needleman, S. B., Wunsch, C. D., J. Mol. Biol. 48:443-453 (1970).

[0455] It is well know to those skilled in the art that implication of alignment algorithms by various programs may result in minor changes in the generated output. These changes include but are not limited to: alignment scores (percent identity, similarity, and gap), display of nonaligned flanking sequence regions, and number assignment to residues. These minor changes in the output of an alignment do not alter the physical characteristics of the sequences or the differences between the sequences, e.g. regions of homology, insertions, or deletions.

### Example 1c

### RT-PCR Analysis

[0456] To detect the presence and tissue distribution of a particular splice variant Reverse Transcription-Polymerase Chain Reaction (RT-PCR) is performed using cDNA generated from a panel of tissue RNAs. See, e.g., Sambrook et al., Molecular Cloning: A Laboratory Manual, 2d ed., Cold Spring Harbor Laboratory Press (1989) and; Kawasaki E S et al., PNAS 85(15):5698 (1988). Total RNA is extracted from a variety of tissues and first strand cDNA is prepared with reverse transcriptase (RT). Each panel includes 23 cDNAs from five cancer types (lung, ovary, breast, colon, and prostate) and normal samples of testis, placenta and fetal brain. Each cancer set is composed of three cancer cDNAs from different donors and one normal pooled sample. Using a standard enzyme kit from BD Bioscience Clontech (Mountain View, Calif.), the target transcript is detected with sequence-specific primers designed to only amplify the particular splice variant. The PCR reaction is run on the GeneAmp PCR system 9700 (Applied Biosystem, Foster City, Calif.) thermocycler under optimal conditions. One of ordinary skill can design appropriate primers and determine optimal conditions. The amplified product is resolved on an agarose gel to detect a band of equivalent size to the predicted RT-PCR product. A band indicated the presence of the splice variant in a sample. The relation of the amplified product to the splice variant was subsequently confirmed by DNA sequencing.

[0457] After subcloning, all positively screened clones are sequence verified. The DNA sequence verification results show the splice variant contains the predicted sequence differences in comparison with the reference sequence.

[0458] Results for RT-PCR analysis include the Sequence DEX ID, Lead Name, Cancer Tissue(s) the transcript was detected in, Normal Tissue(s) the transcript was detected in, the predicted length of the RT-PCR product, and the Confirmed Length of the RT-PCR product.

[0459] RT-PCR results confirm the presence SEQ ID NO: 1-95 in biologic samples and distinguish between related transcripts.

### Example 1d

### Secretion Assay

[0460] To determine if a protein encoded by a splice variant is secreted from cells a secretion assay is preformed. A pcDNA3.1 clone containing the gene transcript which encodes the variant protein is transfected into 293T cells using the Superfect transfection reagent (Qiagen, Valencia Calif.). Transfected cells are incubated for 28 hours before the media is collected and immediately spun down to remove any detached cells. The adherent cells are solubilized with lysis buffer (1% NP40, 10 mM sodium phosphate pH7.0, and 0.15M NaCl). The lysed cells are collected and spun down and the supernatant extracted as cell lysate. Western immunoblot is carried out in the following manner: 15 μl of the cell lysate and media are run on 4-12% NuPage Bis-Tris gel (Invitrogen, Carlsbad Calif.), and blotted onto a PVDF membrane (Invitrogen, Carlsbad Calif.). The blot is incubated with a polyclonal primary antibody which binds to the variant protein (Imgenex, San Diego Calif.) and polyclonal goat anti-rabbit-peroxidase secondary antibody (Sigma-Aldrich, St. Louis Mo.). The blot is developed with the ECL Plus chemiluminescent detection reagent (Amersham BioSciences, Piscataway N.J.).

[0461] Secretion assay results are indicative of SEQ ID NO: 96-237 being a diagnostic marker and/or therapeutic target for cancer.

### Example 2a

### Gene Expression Analysis

[0462] Custom Microarray Experiment—Cancer

[0463] Custom oligonucleotide microarrays were provided by Agilent Technologies, Inc. (Palo Alto, Calif.). The microarrays were fabricated by Agilent using their technology for the in-situ synthesis of 60 mer oligonucleotides (Hughes, et al. 2001, Nature Biotechnology 19:342-347). The 60 mer microarray probes were designed by Agilent, from gene sequences provided by diaDexus, using Agilent proprietary algorithms. Whenever possible two different 60 mers were designed for each gene of interest.

[0464] All microarray experiments were two-color experiments and were preformed using Agilent-recommended protocols and reagents. Briefly, each microarray was hybridized with cRNAs synthesized from RNA (total RNA for ovarian and prostate, polyA+RNA for lung, breast and colon samples), isolated from cancer and normal tissues, labeled with fluorescent dyes Cyanine3 (Cy3) or Cyanine5 (Cy5) (NEN Life Science Products, Inc., Boston, Mass.) using a linear amplification method (Agilent). In each experiment the experimental sample was RNA isolated from cancer tissue from a single individual and the reference sample was a pool of RNA isolated from normal tissues of the same organ as the cancerous tissue (i.e. normal ovarian tissue in experiments with ovarian cancer samples). Hybridizations were carried out at 60° C., overnight using Agilent in-situ hybridization buffer. Following washing, arrays were scanned with a GenePix 4000B Microarray Scanner (Axon Instruments, Inc., Union City, Calif.). The resulting images were analyzed with GenePix Pro 3.0 Microarray Acquisition and Analysis Software (Axon).

[0465] Data normalization and expression profiling were done with Expressionist software from GeneData Inc. (Daly City, Calif./Basel, Switzerland). Gene expression analysis was performed using only experiments that met certain quality criteria. The quality criteria that experiments must meet are a combination of evaluations performed by the Expressionist software and evaluations performed manually using raw and normalized data. To evaluate raw data quality, detection limits (the mean signal for a replicated negative control+2 Standard Deviations (SD)) for each channel were calculated. The detection limit is a measure of non-specific hybridization. Acceptable detection limits were defined for each dye (<80 for Cy5 and <150 for Cy3). Arrays with poor detection limits in one or both channels were not analyzed and the experiments were repeated. To evaluate normalized data quality, positive control elements included in the array were utilized. These array features should have a mean ratio of 1 (no differential expression). If these features have a mean ratio of greater than 1.5-fold up or down, the experiments were not analyzed further and were repeated. In addition to traditional scatter plots demonstrating the distribution of signal in each experiment, the Expressionist software also has minimum thresholding criteria that employ user defined parameters to identify quality data. These thresholds include two distinct quality measurements: 1) minimum area percentage, which is a measure of the integrity of each spot and 2) signal to noise ratio, which ensures that the signal being measured is significantly above any background (nonspecific) signal present. Only those features that met the threshold criteria were included in the filtering and analyses carried out by Expressionist. The thresholding settings employed require a minimum area percentage of 60% [(% pixels>background+2SD)−(% pixels saturated)], and a minimum signal to noise ratio of 2.0 in both channels. By these criteria, very low expressors, saturated features and spots with abnormally high local background were not included in analysis.

[0466] Relative expression data was collected from Expressionist based on filtering and clustering analyses. Up-regulated genes were identified using criteria for the percentage of experiments in which the gene is up-regulated by at least 2-fold. In general, up-regulation in ˜30% of samples tested was used as a cutoff for filtering.

[0467] Two microarray experiments were preformed for each normal and cancer tissue pair. The tissue specific Array Chip for each cancer tissue is a unique microarray specific to that tissue and cancer. The Multi-Cancer Array Chip is a universal microarray that was hybridized with samples from each of the cancers (ovarian, breast, colon, lung, and prostate). See the description below for the experiments specific to the different cancers.

Microarray Experiments and Data Tables

[0468] Colon Cancer Chips

[0469] For colon cancer two different chip designs were evaluated with overlapping sets of a total of 38 samples, comparing the expression patterns of colon cancer derived polyA+RNA to polyA+RNA isolated from a pool of 7 normal colon tissues. For the Colon Array Chip all 38 samples (23 Ascending colon carcinomas and 15 Rectosigmoidal carcinomas including: 5 stage I cancers, 15 stage II cancers, 15 stage III and 2 stage IV cancers, as well as 28 Grade1/2 and 10 Grade 3 cancers) were analyzed. The histopathologic grades for cancer are classified as follows: GX, cannot be assessed; G1, well differentiated; G2, Moderately differentiated; G3, poorly differentiated; and G4, undifferentiated. AJCC Cancer Staging Handbook, 5^{th} Edition, 1998, page 9. For the Colon Array Chip analysis, samples were further divided into groups based on the expression pattern of the known colon cancer associated gene Thymidilate Synthase (TS) (13 TS up 25 TS not up). The association of TS with advanced colorectal cancer is well documented. Paradiso et al., Br J Cancer 82(3):560-7 (2000); Etienne et al., J Clin Oncol. 20(12):2832-43 (2002); Aschele et al. Clin Cancer Res. 6(12):4797-802 (2000). For the Multi-Cancer Array Chip a subset of 27 of these samples (14 Ascending colon carcinomas and 13 Rectosigmoidal carcinomas including: 3 stage I cancers, 9 stage II cancers, 13 stage III and 2 stage IV cancers) were assessed.

[0470] The results for the statistically significant up-regulated genes on the Colon Array Chip are shown in Table 1 and 2. The results for the statistically significant up-regulated genes on the Multi-Cancer Array Chip are shown in Table 3.

[0471] The first two columns of each table contain information about the sequence itself (Seq ID, Oligo Name), the next columns show the results obtained for all (“ALL”) the colon samples, ascending colon carcinomas (“ASC”), Rectosigmoidal carcinomas (“RS”), cancers corresponding to stages I and II (“ST1,2”), stages III and IV (“ST3,4”), grades 1 and 2 (“GR1,2”), grade 3 (“GR3”), cancers exhibiting up-regulation of the TS gene (“TSup”) or those not exhibiting up-regulation of the TS gene (“NOT TSup”). ‘% up’ indicates the percentage of all experiments in which up-regulation of at least 2-fold was observed n=38 for the Colon Array Chip (n=27 for the Multi-Cancer Array Chip), ‘% valid up’ indicates the percentage of experiments with valid expression values in which up-regulation of at least 2-fold was observed.

TABLE 1

| | | | Cln | | Cln | | Cln | | Cln | | Cln |
|---|---|---|---|---|---|---|---|---|---|---|---|
| | | Cln | ALL % | Cln | ASC % | Cln | RS % | Cln | ST1, 2 % | Cln | ST3, 4 % |
| | | ALL | valid | ASC | valid | RS | valid | ST1, 2 | valid | ST3, 4 | valid |
| | Oligo | % up | up | % up | up | % up | up | % up | up | % up | up |
| DEX ID | Name | n = 38 | n = 38 | n = 23 | n = 23 | n = 15 | n = 15 | n = 20 | n = 20 | n = 18 | n = 18 |
| DEX0448_001.nt.1 | 34940.0 | 23.7 | 23.7 | 30.4 | 30.4 | 13.3 | 13.3 | 25.0 | 25.0 | 22.2 | 22.2 |
| DEX0448_002.nt.1 | 39957.0 | 52.6 | 52.6 | 56.5 | 56.5 | 46.7 | 46.7 | 70.0 | 70.0 | 33.3 | 33.3 |
| DEX0448_002.nt.1 | 39958.0 | 44.7 | 44.7 | 43.5 | 43.5 | 46.7 | 46.7 | 60.0 | 60.0 | 27.8 | 27.8 |
| DEX0448_003.nt.1 | 32057.0 | 18.4 | 18.4 | 26.1 | 26.1 | 6.7 | 6.7 | 15.0 | 15.0 | 22.2 | 22.2 |
| DEX0448_004.nt.1 | 41210.0 | 21.1 | 21.1 | 30.4 | 30.4 | 6.7 | 6.7 | 15.0 | 15.0 | 27.8 | 27.8 |
| DEX0448_005.nt.2 | 36243.0 | 34.2 | 34.2 | 43.5 | 43.5 | 20.0 | 20.0 | 40.0 | 40.0 | 27.8 | 27.8 |
| DEX0448_006.nt.1 | 8410.0 | 13.2 | 13.2 | 13.0 | 13.0 | 13.3 | 13.3 | 15.0 | 15.0 | 11.1 | 11.1 |
| DEX0448_007.nt.1 | 26449.0 | 10.5 | 10.8 | 13.0 | 13.0 | 6.7 | 7.1 | 5.0 | 5.0 | 16.7 | 17.6 |
| DEX0448_008.nt.1 | 32851.0 | 28.9 | 28.9 | 30.4 | 30.4 | 26.7 | 26.7 | 35.0 | 35.0 | 22.2 | 22.2 |
| DEX0448_009.nt.1 | 34680.0 | 55.3 | 61.8 | 56.5 | 59.1 | 53.3 | 66.7 | 45.0 | 56.2 | 66.7 | 66.7 |
| DEX0448_009.nt.1 | 40809.0 | 57.9 | 57.9 | 56.5 | 56.5 | 60.0 | 60.0 | 55.0 | 55.0 | 61.1 | 61.1 |
| DEX0448_009.nt.1 | 40810.0 | 57.9 | 57.9 | 56.5 | 56.5 | 60.0 | 60.0 | 55.0 | 55.0 | 61.1 | 61.1 |
| DEX0448_010.nt.1 | 28423.0 | 18.4 | 18.9 | 30.4 | 30.4 | 0.0 | 0.0 | 20.0 | 20.0 | 16.7 | 17.6 |
| DEX0448_011.nt.1 | 8312.0 | 2.6 | 2.8 | 4.3 | 4.3 | 0.0 | 0.0 | 0.0 | 0.0 | 5.6 | 5.9 |
| DEX0448_013.nt.1 | 16006.0 | 18.4 | 18.4 | 26.1 | 26.1 | 6.7 | 6.7 | 5.0 | 5.0 | 33.3 | 33.3 |
| DEX0448_014.nt.1 | 37376.0 | 23.7 | 23.7 | 13.0 | 13.0 | 40.0 | 40.0 | 20.0 | 20.0 | 27.8 | 27.8 |
| DEX0448_014.nt.1 | 37378.0 | 21.1 | 21.1 | 13.0 | 13.0 | 33.3 | 33.3 | 20.0 | 20.0 | 22.2 | 22.2 |
| DEX0448_015.nt.1 | 33348.0 | 34.2 | 34.2 | 34.8 | 34.8 | 33.3 | 33.3 | 30.0 | 30.0 | 38.9 | 38.9 |
| DEX0448_015.nt.1 | 38996.0 | 28.9 | 29.7 | 26.1 | 27.3 | 33.3 | 33.3 | 25.0 | 25.0 | 33.3 | 35.3 |
| DEX0448_017.nt.1 | 36179.0 | 15.8 | 16.7 | 8.7 | 9.5 | 26.7 | 26.7 | 15.0 | 16.7 | 16.7 | 16.7 |
| DEX0448_017.nt.1 | 36180.0 | 10.5 | 11.1 | 8.7 | 9.5 | 13.3 | 13.3 | 15.0 | 16.7 | 5.6 | 5.6 |
| DEX0448_017.nt.1 | 36181.0 | 0.0 | 0.0 | 0.0 | 0.0 | 0.0 | 0.0 | 0.0 | 0.0 | 0.0 | 0.0 |
| DEX0448_017.nt.1 | 36182.0 | 2.6 | 3.2 | 4.3 | 5.6 | 0.0 | 0.0 | 0.0 | 0.0 | 5.6 | 6.2 |
| DEX0448_017.nt.1 | 36184.0 | 36.8 | 36.8 | 43.5 | 43.5 | 26.7 | 26.7 | 45.0 | 45.0 | 27.8 | 27.8 |
| DEX0448_017.nt.1 | 37227.0 | 5.3 | 6.5 | 4.3 | 5.9 | 6.7 | 7.1 | 5.0 | 6.2 | 5.6 | 6.7 |
| DEX0448_017.nt.1 | 37228.0 | 2.6 | 3.1 | 4.3 | 5.6 | 0.0 | 0.0 | 0.0 | 0.0 | 5.6 | 6.2 |
| DEX0448_017.nt.1 | 37239.0 | 28.9 | 28.9 | 34.8 | 34.8 | 20.0 | 20.0 | 30.0 | 30.0 | 27.8 | 27.8 |
| DEX0448_017.nt.1 | 37240.0 | 34.2 | 35.1 | 39.1 | 39.1 | 26.7 | 28.6 | 35.0 | 35.0 | 33.3 | 35.3 |
| DEX0448_017.nt.1 | 37895.0 | 5.3 | 10.5 | 0.0 | 0.0 | 13.3 | 33.3 | 0.0 | 0.0 | 11.1 | 20.0 |
| DEX0448_018.nt.1 | 41823.0 | 23.7 | 23.7 | 26.1 | 26.1 | 20.0 | 20.0 | 25.0 | 25.0 | 22.2 | 22.2 |
| DEX0448_018.nt.1 | 41824.0 | 15.8 | 15.8 | 21.7 | 21.7 | 6.7 | 6.7 | 15.0 | 15.0 | 16.7 | 16.7 |
| DEX0448_020.nt.1 | 39655.0 | 44.7 | 44.7 | 56.5 | 56.5 | 26.7 | 26.7 | 40.0 | 40.0 | 50.0 | 50.0 |
| DEX0448_020.nt.1 | 39656.0 | 26.3 | 26.3 | 30.4 | 30.4 | 20.0 | 20.0 | 25.0 | 25.0 | 27.8 | 27.8 |
| DEX0448_021.nt.1 | 30819.0 | 0.0 | 0.0 | 0.0 | 0.0 | 0.0 | 0.0 | 0.0 | 0.0 | 0.0 | 0.0 |
| DEX0448_021.nt.1 | 30870.0 | 0.0 | 0.0 | 0.0 | 0.0 | 0.0 | 0.0 | 0.0 | 0.0 | 0.0 | 0.0 |
| DEX0448_021.nt.1 | 30931.0 | 0.0 | 0.0 | 0.0 | 0.0 | 0.0 | 0.0 | 0.0 | 0.0 | 0.0 | 0.0 |
| DEX0448_021.nt.1 | 31146.0 | 0.0 | 0.0 | 0.0 | 0.0 | 0.0 | 0.0 | 0.0 | 0.0 | 0.0 | 0.0 |
| DEX0448_021.nt.1 | 31154.0 | 7.9 | 7.9 | 8.7 | 8.7 | 6.7 | 6.7 | 0.0 | 0.0 | 16.7 | 16.7 |
| DEX0448_021.nt.1 | 31155.0 | 7.9 | 8.6 | 8.7 | 10.0 | 6.7 | 6.7 | 5.0 | 5.6 | 11.1 | 11.8 |
| DEX0448_021.nt.1 | 31157.0 | 2.6 | 2.6 | 0.0 | 0.0 | 6.7 | 6.7 | 0.0 | 0.0 | 5.6 | 5.6 |
| DEX0448_021.nt.1 | 35218.0 | 0.0 | 0.0 | 0.0 | 0.0 | 0.0 | 0.0 | 0.0 | 0.0 | 0.0 | 0.0 |
| DEX0448_021.nt.2 | 30819.0 | 0.0 | 0.0 | 0.0 | 0.0 | 0.0 | 0.0 | 0.0 | 0.0 | 0.0 | 0.0 |
| DEX0448_021.nt.2 | 30870.0 | 0.0 | 0.0 | 0.0 | 0.0 | 0.0 | 0.0 | 0.0 | 0.0 | 0.0 | 0.0 |
| DEX0448_021.nt.2 | 30931.0 | 0.0 | 0.0 | 0.0 | 0.0 | 0.0 | 0.0 | 0.0 | 0.0 | 0.0 | 0.0 |
| DEX0448_021.nt.2 | 31146.0 | 0.0 | 0.0 | 0.0 | 0.0 | 0.0 | 0.0 | 0.0 | 0.0 | 0.0 | 0.0 |
| DEX0448_021.nt.2 | 31154.0 | 7.9 | 7.9 | 8.7 | 8.7 | 6.7 | 6.7 | 0.0 | 0.0 | 16.7 | 16.7 |
| DEX0448_021.nt.2 | 31155.0 | 7.9 | 8.6 | 8.7 | 10.0 | 6.7 | 6.7 | 5.0 | 5.6 | 11.1 | 11.8 |
| DEX0448_021.nt.2 | 31157.0 | 2.6 | 2.6 | 0.0 | 0.0 | 6.7 | 6.7 | 0.0 | 0.0 | 5.6 | 5.6 |
| DEX0448_021.nt.2 | 35218.0 | 0.0 | 0.0 | 0.0 | 0.0 | 0.0 | 0.0 | 0.0 | 0.0 | 0.0 | 0.0 |
| DEX0448_021.nt.3 | 30819.0 | 0.0 | 0.0 | 0.0 | 0.0 | 0.0 | 0.0 | 0.0 | 0.0 | 0.0 | 0.0 |
| DEX0448_021.nt.3 | 30870.0 | 0.0 | 0.0 | 0.0 | 0.0 | 0.0 | 0.0 | 0.0 | 0.0 | 0.0 | 0.0 |
| DEX0448_021.nt.3 | 31154.0 | 7.9 | 7.9 | 8.7 | 8.7 | 6.7 | 6.7 | 0.0 | 0.0 | 16.7 | 16.7 |
| DEX0448_021.nt.3 | 31157.0 | 2.6 | 2.6 | 0.0 | 0.0 | 6.7 | 6.7 | 0.0 | 0.0 | 5.6 | 5.6 |
| DEX0448_021.nt.3 | 35218.0 | 0.0 | 0.0 | 0.0 | 0.0 | 0.0 | 0.0 | 0.0 | 0.0 | 0.0 | 0.0 |
| DEX0448_022.nt.1 | 36878.0 | 36.8 | 37.8 | 47.8 | 47.8 | 20.0 | 21.4 | 25.0 | 26.3 | 50.0 | 50.0 |
| DEX0448_022.nt.1 | 37415.0 | 52.6 | 52.6 | 69.6 | 69.6 | 26.7 | 26.7 | 50.0 | 50.0 | 55.6 | 55.6 |
| DEX0448_022.nt.2 | 36878.0 | 36.8 | 37.8 | 47.8 | 47.8 | 20.0 | 21.4 | 25.0 | 26.3 | 50.0 | 50.0 |
| DEX0448_022.nt.2 | 37415.0 | 52.6 | 52.6 | 69.6 | 69.6 | 26.7 | 26.7 | 50.0 | 50.0 | 55.6 | 55.6 |
| DEX0448_023.nt.1 | 22297.0 | 21.1 | 21.1 | 30.4 | 30.4 | 6.7 | 6.7 | 20.0 | 20.0 | 22.2 | 22.2 |
| DEX0448_024.nt.1 | 19607.0 | 36.8 | 36.8 | 43.5 | 43.5 | 26.7 | 26.7 | 30.0 | 30.0 | 44.4 | 44.4 |
| DEX0448_025.nt.1 | 40033.0 | 81.6 | 81.6 | 82.6 | 82.6 | 80.0 | 80.0 | 80.0 | 80.0 | 83.3 | 83.3 |
| DEX0448_025.nt.1 | 40034.0 | 78.9 | 78.9 | 82.6 | 82.6 | 73.3 | 73.3 | 75.0 | 75.0 | 83.3 | 83.3 |
| DEX0448_026.nt.1 | 41210.0 | 21.1 | 21.1 | 30.4 | 30.4 | 6.7 | 6.7 | 15.0 | 15.0 | 27.8 | 27.8 |
| DEX0448_026.nt.1 | 41284.0 | 5.3 | 5.3 | 8.7 | 8.7 | 0.0 | 0.0 | 5.0 | 5.0 | 5.6 | 5.6 |
| DEX0448_026.nt.2 | 41210.0 | 21.1 | 21.1 | 30.4 | 30.4 | 6.7 | 6.7 | 15.0 | 15.0 | 27.8 | 27.8 |
| DEX0448_026.nt.2 | 41284.0 | 5.3 | 5.3 | 8.7 | 8.7 | 0.0 | 0.0 | 5.0 | 5.0 | 5.6 | 5.6 |
| DEX0448_027.nt.1 | 9622.0 | 15.8 | 15.8 | 21.7 | 21.7 | 6.7 | 6.7 | 15.0 | 15.0 | 16.7 | 16.7 |
| DEX0448_027.nt.1 | 9623.0 | 15.8 | 15.8 | 21.7 | 21.7 | 6.7 | 6.7 | 15.0 | 15.0 | 16.7 | 16.7 |
| DEX0448_027.nt.2 | 9622.0 | 15.8 | 15.8 | 21.7 | 21.7 | 6.7 | 6.7 | 15.0 | 15.0 | 16.7 | 16.7 |
| DEX0448_027.nt.2 | 9623.0 | 15.8 | 15.8 | 21.7 | 21.7 | 6.7 | 6.7 | 15.0 | 15.0 | 16.7 | 16.7 |
| DEX0448_027.nt.3 | 9622.0 | 15.8 | 15.8 | 21.7 | 21.7 | 6.7 | 6.7 | 15.0 | 15.0 | 16.7 | 16.7 |
| DEX0448_027.nt.3 | 9623.0 | 15.8 | 15.8 | 21.7 | 21.7 | 6.7 | 6.7 | 15.0 | 15.0 | 16.7 | 16.7 |
| DEX0448_027.nt.4 | 9622.0 | 15.8 | 15.8 | 21.7 | 21.7 | 6.7 | 6.7 | 15.0 | 15.0 | 16.7 | 16.7 |
| DEX0448_027.nt.4 | 9623.0 | 15.8 | 15.8 | 21.7 | 21.7 | 6.7 | 6.7 | 15.0 | 15.0 | 16.7 | 16.7 |
| DEX0448_027.nt.5 | 9622.0 | 15.8 | 15.8 | 21.7 | 21.7 | 6.7 | 6.7 | 15.0 | 15.0 | 16.7 | 16.7 |
| DEX0448_027.nt.5 | 9623.0 | 15.8 | 15.8 | 21.7 | 21.7 | 6.7 | 6.7 | 15.0 | 15.0 | 16.7 | 16.7 |
| DEX0448_027.nt.6 | 9622.0 | 15.8 | 15.8 | 21.7 | 21.7 | 6.7 | 6.7 | 15.0 | 15.0 | 16.7 | 16.7 |
| DEX0448_027.nt.6 | 9623.0 | 15.8 | 15.8 | 21.7 | 21.7 | 6.7 | 6.7 | 15.0 | 15.0 | 16.7 | 16.7 |
| DEX0448_029.nt.1 | 28733.0 | 0.0 | 0.0 | 0.0 | 0.0 | 0.0 | 0.0 | 0.0 | 0.0 | 0.0 | 0.0 |
| DEX0448_029.nt.1 | 28734.0 | 13.2 | 13.2 | 13.0 | 13.0 | 13.3 | 13.3 | 5.0 | 5.0 | 22.2 | 22.2 |
| DEX0448_029.nt.1 | 38381.0 | 2.6 | 2.9 | 0.0 | 0.0 | 6.7 | 7.7 | 0.0 | 0.0 | 5.6 | 6.7 |
| DEX0448_029.nt.1 | 38382.0 | 0.0 | 0.0 | 0.0 | 0.0 | 0.0 | 0.0 | 0.0 | 0.0 | 0.0 | 0.0 |
| DEX0448_029.nt.1 | 38383.0 | 2.6 | 2.6 | 4.3 | 4.3 | 0.0 | 0.0 | 0.0 | 0.0 | 5.6 | 5.6 |
| DEX0448_029.nt.1 | 38384.0 | 2.6 | 2.6 | 4.3 | 4.3 | 0.0 | 0.0 | 0.0 | 0.0 | 5.6 | 5.6 |
| DEX0448_029.nt.2 | 28733.0 | 0.0 | 0.0 | 0.0 | 0.0 | 0.0 | 0.0 | 0.0 | 0.0 | 0.0 | 0.0 |
| DEX0448_029.nt.2 | 28734.0 | 13.2 | 13.2 | 13.0 | 13.0 | 13.3 | 13.3 | 5.0 | 5.0 | 22.2 | 22.2 |
| DEX0448_029.nt.2 | 38381.0 | 2.6 | 2.9 | 0.0 | 0.0 | 6.7 | 7.7 | 0.0 | 0.0 | 5.6 | 6.7 |
| DEX0448_029.nt.2 | 38382.0 | 0.0 | 0.0 | 0.0 | 0.0 | 0.0 | 0.0 | 0.0 | 0.0 | 0.0 | 0.0 |
| DEX0448_029.nt.2 | 38383.0 | 2.6 | 2.6 | 4.3 | 4.3 | 0.0 | 0.0 | 0.0 | 0.0 | 5.6 | 5.6 |
| DEX0448_029.nt.2 | 38384.0 | 2.6 | 2.6 | 4.3 | 4.3 | 0.0 | 0.0 | 0.0 | 0.0 | 5.6 | 5.6 |
| DEX0448_029.nt.3 | 28733.0 | 0.0 | 0.0 | 0.0 | 0.0 | 0.0 | 0.0 | 0.0 | 0.0 | 0.0 | 0.0 |
| DEX0448_029.nt.3 | 28734.0 | 13.2 | 13.2 | 13.0 | 13.0 | 13.3 | 13.3 | 5.0 | 5.0 | 22.2 | 22.2 |
| DEX0448_029.nt.3 | 38381.0 | 2.6 | 2.9 | 0.0 | 0.0 | 6.7 | 7.7 | 0.0 | 0.0 | 5.6 | 6.7 |
| DEX0448_029.nt.3 | 38382.0 | 0.0 | 0.0 | 0.0 | 0.0 | 0.0 | 0.0 | 0.0 | 0.0 | 0.0 | 0.0 |
| DEX0448_029.nt.3 | 38383.0 | 2.6 | 2.6 | 4.3 | 4.3 | 0.0 | 0.0 | 0.0 | 0.0 | 5.6 | 5.6 |
| DEX0448_029.nt.3 | 38384.0 | 2.6 | 2.6 | 4.3 | 4.3 | 0.0 | 0.0 | 0.0 | 0.0 | 5.6 | 5.6 |
| DEX0448_029.nt.4 | 28733.0 | 0.0 | 0.0 | 0.0 | 0.0 | 0.0 | 0.0 | 0.0 | 0.0 | 0.0 | 0.0 |
| DEX0448_029.nt.4 | 28734.0 | 13.2 | 13.2 | 13.0 | 13.0 | 13.3 | 13.3 | 5.0 | 5.0 | 22.2 | 22.2 |
| DEX0448_029.nt.4 | 38381.0 | 2.6 | 2.9 | 0.0 | 0.0 | 6.7 | 7.7 | 0.0 | 0.0 | 5.6 | 6.7 |
| DEX0448_029.nt.4 | 38382.0 | 0.0 | 0.0 | 0.0 | 0.0 | 0.0 | 0.0 | 0.0 | 0.0 | 0.0 | 0.0 |
| DEX0448_029.nt.4 | 38383.0 | 2.6 | 2.6 | 4.3 | 4.3 | 0.0 | 0.0 | 0.0 | 0.0 | 5.6 | 5.6 |
| DEX0448_029.nt.4 | 38384.0 | 2.6 | 2.6 | 4.3 | 4.3 | 0.0 | 0.0 | 0.0 | 0.0 | 5.6 | 5.6 |
| DEX0448_029.nt.5 | 28733.0 | 0.0 | 0.0 | 0.0 | 0.0 | 0.0 | 0.0 | 0.0 | 0.0 | 0.0 | 0.0 |
| DEX0448_029.nt.5 | 28734.0 | 13.2 | 13.2 | 13.0 | 13.0 | 13.3 | 13.3 | 5.0 | 5.0 | 22.2 | 22.2 |
| DEX0448_029.nt.5 | 38381.0 | 2.6 | 2.9 | 0.0 | 0.0 | 6.7 | 7.7 | 0.0 | 0.0 | 5.6 | 6.7 |
| DEX0448_029.nt.5 | 38382.0 | 0.0 | 0.0 | 0.0 | 0.0 | 0.0 | 0.0 | 0.0 | 0.0 | 0.0 | 0.0 |
| DEX0448_029.nt.5 | 38383.0 | 2.6 | 2.6 | 4.3 | 4.3 | 0.0 | 0.0 | 0.0 | 0.0 | 5.6 | 5.6 |
| DEX0448_029.nt.5 | 38384.0 | 2.6 | 2.6 | 4.3 | 4.3 | 0.0 | 0.0 | 0.0 | 0.0 | 5.6 | 5.6 |
| DEX0448_029.nt.6 | 28733.0 | 0.0 | 0.0 | 0.0 | 0.0 | 0.0 | 0.0 | 0.0 | 0.0 | 0.0 | 0.0 |
| DEX0448_029.nt.6 | 28734.0 | 13.2 | 13.2 | 13.0 | 13.0 | 13.3 | 13.3 | 5.0 | 5.0 | 22.2 | 22.2 |
| DEX0448_029.nt.6 | 38381.0 | 2.6 | 2.9 | 0.0 | 0.0 | 6.7 | 7.7 | 0.0 | 0.0 | 5.6 | 6.7 |
| DEX0448_029.nt.6 | 38382.0 | 0.0 | 0.0 | 0.0 | 0.0 | 0.0 | 0.0 | 0.0 | 0.0 | 0.0 | 0.0 |
| DEX0448_029.nt.6 | 38383.0 | 2.6 | 2.6 | 4.3 | 4.3 | 0.0 | 0.0 | 0.0 | 0.0 | 5.6 | 5.6 |
| DEX0448_029.nt.6 | 38384.0 | 2.6 | 2.6 | 4.3 | 4.3 | 0.0 | 0.0 | 0.0 | 0.0 | 5.6 | 5.6 |
| DEX0448_029.nt.7 | 28733.0 | 0.0 | 0.0 | 0.0 | 0.0 | 0.0 | 0.0 | 0.0 | 0.0 | 0.0 | 0.0 |
| DEX0448_029.nt.7 | 28734.0 | 13.2 | 13.2 | 13.0 | 13.0 | 13.3 | 13.3 | 5.0 | 5.0 | 22.2 | 22.2 |
| DEX0448_029.nt.7 | 38381.0 | 2.6 | 2.9 | 0.0 | 0.0 | 6.7 | 7.7 | 0.0 | 0.0 | 5.6 | 6.7 |
| DEX0448_029.nt.7 | 38382.0 | 0.0 | 0.0 | 0.0 | 0.0 | 0.0 | 0.0 | 0.0 | 0.0 | 0.0 | 0.0 |
| DEX0448_029.nt.7 | 38383.0 | 2.6 | 2.6 | 4.3 | 4.3 | 0.0 | 0.0 | 0.0 | 0.0 | 5.6 | 5.6 |
| DEX0448_029.nt.7 | 38384.0 | 2.6 | 2.6 | 4.3 | 4.3 | 0.0 | 0.0 | 0.0 | 0.0 | 5.6 | 5.6 |
| DEX0448_030.nt.1 | 29603.0 | 5.3 | 5.3 | 8.7 | 8.7 | 0.0 | 0.0 | 5.0 | 5.0 | 5.6 | 5.6 |
| DEX0448_030.nt.1 | 29604.0 | 7.9 | 8.1 | 13.0 | 13.0 | 0.0 | 0.0 | 10.0 | 10.0 | 5.6 | 5.9 |
| DEX0448_030.nt.1 | 40867.0 | 10.5 | 11.4 | 17.4 | 19.0 | 0.0 | 0.0 | 5.0 | 5.3 | 16.7 | 18.8 |
| DEX0448_030.nt.1 | 40868.0 | 13.2 | 13.2 | 21.7 | 21.7 | 0.0 | 0.0 | 5.0 | 5.0 | 22.2 | 22.2 |
| DEX0448_032.nt.1 | 36179.0 | 15.8 | 16.7 | 8.7 | 9.5 | 26.7 | 26.7 | 15.0 | 16.7 | 16.7 | 16.7 |
| DEX0448_032.nt.1 | 36180.0 | 10.5 | 11.1 | 8.7 | 9.5 | 13.3 | 13.3 | 15.0 | 16.7 | 5.6 | 5.6 |
| DEX0448_032.nt.1 | 36182.0 | 2.6 | 3.2 | 4.3 | 5.6 | 0.0 | 0.0 | 0.0 | 0.0 | 5.6 | 6.2 |
| DEX0448_032.nt.1 | 36184.0 | 36.8 | 36.8 | 43.5 | 43.5 | 26.7 | 26.7 | 45.0 | 45.0 | 27.8 | 27.8 |
| DEX0448_032.nt.1 | 37227.0 | 5.3 | 6.5 | 4.3 | 5.9 | 6.7 | 7.1 | 5.0 | 6.2 | 5.6 | 6.7 |
| DEX0448_032.nt.1 | 37228.0 | 2.6 | 3.1 | 4.3 | 5.6 | 0.0 | 0.0 | 0.0 | 0.0 | 5.6 | 6.2 |
| DEX0448_032.nt.1 | 37239.0 | 28.9 | 28.9 | 34.8 | 34.8 | 20.0 | 20.0 | 30.0 | 30.0 | 27.8 | 27.8 |
| DEX0448_032.nt.1 | 37240.0 | 34.2 | 35.1 | 39.1 | 39.1 | 26.7 | 28.6 | 35.0 | 35.0 | 33.3 | 35.3 |
| DEX0448_035.nt.1 | 23862.0 | 18.4 | 18.4 | 13.0 | 13.0 | 26.7 | 26.7 | 10.0 | 10.0 | 27.8 | 27.8 |
| DEX0448_035.nt.1 | 23863.0 | 26.3 | 26.3 | 26.1 | 26.1 | 26.7 | 26.7 | 20.0 | 20.0 | 33.3 | 33.3 |
| DEX0448_035.nt.2 | 23862.0 | 18.4 | 18.4 | 13.0 | 13.0 | 26.7 | 26.7 | 10.0 | 10.0 | 27.8 | 27.8 |
| DEX0448_035.nt.2 | 23863.0 | 26.3 | 26.3 | 26.1 | 26.1 | 26.7 | 26.7 | 20.0 | 20.0 | 33.3 | 33.3 |
| DEX0448_035.nt.3 | 23862.0 | 18.4 | 18.4 | 13.0 | 13.0 | 26.7 | 26.7 | 10.0 | 10.0 | 27.8 | 27.8 |
| DEX0448_035.nt.3 | 23863.0 | 26.3 | 26.3 | 26.1 | 26.1 | 26.7 | 26.7 | 20.0 | 20.0 | 33.3 | 33.3 |
| DEX0448_035.nt.4 | 23862.0 | 18.4 | 18.4 | 13.0 | 13.0 | 26.7 | 26.7 | 10.0 | 10.0 | 27.8 | 27.8 |
| DEX0448_035.nt.4 | 23863.0 | 26.3 | 26.3 | 26.1 | 26.1 | 26.7 | 26.7 | 20.0 | 20.0 | 33.3 | 33.3 |
| DEX0448_036.nt.1 | 29532.0 | 26.3 | 26.3 | 34.8 | 34.8 | 13.3 | 13.3 | 20.0 | 20.0 | 33.3 | 33.3 |
| DEX0448_036.nt.1 | 29533.0 | 0.0 | 0.0 | 0.0 | 0.0 | 0.0 | 0.0 | 0.0 | 0.0 | 0.0 | 0.0 |
| DEX0448_036.nt.1 | 29534.0 | 0.0 | 0.0 | 0.0 | 0.0 | 0.0 | 0.0 | 0.0 | 0.0 | 0.0 | 0.0 |
| DEX0448_036.nt.1 | 29540.0 | 0.0 | 0.0 | 0.0 | 0.0 | 0.0 | 0.0 | 0.0 | 0.0 | 0.0 | 0.0 |
| DEX0448_036.nt.1 | 36811.0 | 0.0 | 0.0 | 0.0 | 0.0 | 0.0 | 0.0 | 0.0 | 0.0 | 0.0 | 0.0 |
| DEX0448_036.nt.1 | 36812.0 | 2.6 | 3.2 | 0.0 | 0.0 | 6.7 | 8.3 | 0.0 | 0.0 | 5.6 | 6.7 |
| DEX0448_036.nt.2 | 29532.0 | 26.3 | 26.3 | 34.8 | 34.8 | 13.3 | 13.3 | 20.0 | 20.0 | 33.3 | 33.3 |
| DEX0448_036.nt.2 | 29539.0 | 2.6 | 2.7 | 0.0 | 0.0 | 6.7 | 6.7 | 0.0 | 0.0 | 5.6 | 5.9 |
| DEX0448_036.nt.2 | 29540.0 | 0.0 | 0.0 | 0.0 | 0.0 | 0.0 | 0.0 | 0.0 | 0.0 | 0.0 | 0.0 |
| DEX0448_036.nt.3 | 29532.0 | 26.3 | 26.3 | 34.8 | 34.8 | 13.3 | 13.3 | 20.0 | 20.0 | 33.3 | 33.3 |
| DEX0448_036.nt.3 | 29539.0 | 2.6 | 2.7 | 0.0 | 0.0 | 6.7 | 6.7 | 0.0 | 0.0 | 5.6 | 5.9 |
| DEX0448_036.nt.3 | 29540.0 | 0.0 | 0.0 | 0.0 | 0.0 | 0.0 | 0.0 | 0.0 | 0.0 | 0.0 | 0.0 |
| DEX0448_037.nt.1 | 36341.0 | 10.5 | 10.5 | 13.0 | 13.0 | 6.7 | 6.7 | 5.0 | 5.0 | 16.7 | 16.7 |
| DEX0448_037.nt.1 | 36342.0 | 7.9 | 8.3 | 8.7 | 8.7 | 6.7 | 7.7 | 5.0 | 5.3 | 11.1 | 11.8 |
| DEX0448_037.nt.2 | 36341.0 | 10.5 | 10.5 | 13.0 | 13.0 | 6.7 | 6.7 | 5.0 | 5.0 | 16.7 | 16.7 |
| DEX0448_037.nt.2 | 36342.0 | 7.9 | 8.3 | 8.7 | 8.7 | 6.7 | 7.7 | 5.0 | 5.3 | 11.1 | 11.8 |
| DEX0448_037.nt.3 | 36341.0 | 10.5 | 10.5 | 13.0 | 13.0 | 6.7 | 6.7 | 5.0 | 5.0 | 16.7 | 16.7 |
| DEX0448_037.nt.3 | 36342.0 | 7.9 | 8.3 | 8.7 | 8.7 | 6.7 | 7.7 | 5.0 | 5.3 | 11.1 | 11.8 |
| DEX0448_037.nt.4 | 36341.0 | 10.5 | 10.5 | 13.0 | 13.0 | 6.7 | 6.7 | 5.0 | 5.0 | 16.7 | 16.7 |
| DEX0448_037.nt.4 | 36342.0 | 7.9 | 8.3 | 8.7 | 8.7 | 6.7 | 7.7 | 5.0 | 5.3 | 11.1 | 11.8 |
| DEX0448_037.nt.5 | 36341.0 | 10.5 | 10.5 | 13.0 | 13.0 | 6.7 | 6.7 | 5.0 | 5.0 | 16.7 | 16.7 |
| DEX0448_037.nt.5 | 36342.0 | 7.9 | 8.3 | 8.7 | 8.7 | 6.7 | 7.7 | 5.0 | 5.3 | 11.1 | 11.8 |
| DEX0448_037.nt.6 | 36341.0 | 10.5 | 10.5 | 13.0 | 13.0 | 6.7 | 6.7 | 5.0 | 5.0 | 16.7 | 16.7 |
| DEX0448_037.nt.6 | 36342.0 | 7.9 | 8.3 | 8.7 | 8.7 | 6.7 | 7.7 | 5.0 | 5.3 | 11.1 | 11.8 |
| DEX0448_038.nt.1 | 20895.0 | 28.9 | 29.7 | 34.8 | 36.4 | 20.0 | 20.0 | 30.0 | 31.6 | 27.8 | 27.8 |
| DEX0448_038.nt.1 | 20896.0 | 31.6 | 31.6 | 39.1 | 39.1 | 20.0 | 20.0 | 35.0 | 35.0 | 27.8 | 27.8 |
| DEX0448_039.nt.1 | 38855.0 | 34.2 | 34.2 | 34.8 | 34.8 | 33.3 | 33.3 | 35.0 | 35.0 | 33.3 | 33.3 |
| DEX0448_040.nt.1 | 31347.0 | 31.6 | 32.4 | 34.8 | 34.8 | 26.7 | 28.6 | 40.0 | 40.0 | 22.2 | 23.5 |
| DEX0448_040.nt.1 | 40755.0 | 28.9 | 28.9 | 34.8 | 34.8 | 20.0 | 20.0 | 35.0 | 35.0 | 22.2 | 22.2 |
| DEX0448_040.nt.1 | 40756.0 | 31.6 | 31.6 | 34.8 | 34.8 | 26.7 | 26.7 | 40.0 | 40.0 | 22.2 | 22.2 |
| DEX0448_040.nt.2 | 31346.0 | 36.8 | 36.8 | 39.2 | 39.1 | 33.3 | 33.3 | 40.0 | 40.0 | 33.3 | 33.3 |
| DEX0448_040.nt.2 | 31347.0 | 31.6 | 32.4 | 34.8 | 34.8 | 26.7 | 28.6 | 40.0 | 40.0 | 22.2 | 23.5 |
| DEX0448_040.nt.2 | 40755.0 | 28.9 | 28.9 | 34.8 | 34.8 | 20.0 | 20.0 | 35.0 | 35.0 | 22.2 | 22.2 |
| DEX0448_040.nt.2 | 40756.0 | 31.6 | 31.6 | 34.8 | 34.8 | 26.7 | 26.7 | 40.0 | 40.0 | 22.2 | 22.2 |
| DEX0448_040.nt.3 | 31346.0 | 36.8 | 36.8 | 39.1 | 39.1 | 33.3 | 33.3 | 40.0 | 40.0 | 33.3 | 33.3 |
| DEX0448_040.nt.3 | 31347.0 | 31.6 | 32.4 | 34.8 | 34.8 | 26.7 | 28.6 | 40.0 | 40.0 | 22.2 | 23.5 |
| DEX0448_040.nt.3 | 40755.0 | 28.9 | 28.9 | 34.8 | 34.8 | 20.0 | 20.0 | 35.0 | 35.0 | 22.2 | 22.2 |
| DEX0448_040.nt.3 | 40756.0 | 31.6 | 31.6 | 34.8 | 34.8 | 26.7 | 26.7 | 40.0 | 40.0 | 22.2 | 22.2 |
| DEX0448_040.nt.4 | 31346.0 | 36.8 | 36.8 | 39.1 | 39.1 | 33.3 | 33.3 | 40.0 | 40.0 | 33.3 | 33.3 |
| DEX0448_040.nt.4 | 31347.0 | 31.6 | 32.4 | 34.8 | 34.8 | 26.7 | 28.6 | 40.0 | 40.0 | 22.2 | 23.5 |
| DEX0448_040.nt.4 | 40755.0 | 28.9 | 28.9 | 34.8 | 34.8 | 20.0 | 20.0 | 35.0 | 35.0 | 22.2 | 22.2 |
| DEX0448_040.nt.4 | 40756.0 | 31.6 | 31.6 | 34.8 | 34.8 | 26.7 | 26.7 | 40.0 | 40.0 | 22.2 | 22.2 |
| DEX0448_040.nt.5 | 31346.0 | 36.8 | 36.8 | 39.1 | 39.1 | 33.3 | 33.3 | 40.0 | 40.0 | 33.3 | 33.3 |
| DEX0448_040.nt.5 | 31347.0 | 31.6 | 32.4 | 34.8 | 34.8 | 26.7 | 28.6 | 40.0 | 40.0 | 22.2 | 23.5 |
| DEX0448_040.nt.5 | 40755.0 | 28.9 | 28.9 | 34.8 | 34.8 | 20.0 | 20.0 | 35.0 | 35.0 | 22.2 | 22.2 |
| DEX0448_040.nt.5 | 40756.0 | 31.6 | 31.6 | 34.8 | 34.8 | 26.7 | 26.7 | 40.0 | 40.0 | 22.2 | 22.2 |
| DEX0448_040.nt.6 | 31346.0 | 36.8 | 36.8 | 39.1 | 39.1 | 33.3 | 33.3 | 40.0 | 40.0 | 33.3 | 33.3 |
| DEX0448_040.nt.6 | 31347.0 | 31.6 | 32.4 | 34.8 | 34.8 | 26.7 | 28.6 | 40.0 | 40.0 | 22.2 | 23.5 |
| DEX0448_040.nt.6 | 35943.0 | 0.0 | 0.0 | 0.0 | 0.0 | 0.0 | 0.0 | 0.0 | 0.0 | 0.0 | 0.0 |
| DEX0448_040.nt.6 | 35944.0 | 0.0 | 0.0 | 0.0 | 0.0 | 0.0 | 0.0 | 0.0 | 0.0 | 0.0 | 0.0 |
| DEX0448_040.nt.6 | 40755.0 | 28.9 | 28.9 | 34.8 | 34.8 | 20.0 | 20.0 | 35.0 | 35.0 | 22.2 | 22.2 |
| DEX0448_040.nt.6 | 40756.0 | 31.6 | 31.6 | 34.8 | 34.8 | 26.7 | 26.7 | 40.0 | 40.0 | 22.2 | 22.2 |
| DEX0448_040.nt.7 | 31346.0 | 36.8 | 36.8 | 39.1 | 39.1 | 33.3 | 33.3 | 40.0 | 40.0 | 33.3 | 33.3 |
| DEX0448_040.nt.7 | 31347.0 | 31.6 | 32.4 | 34.8 | 34.8 | 26.7 | 28.6 | 40.0 | 40.0 | 22.2 | 23.5 |
| DEX0448_040.nt.7 | 40755.0 | 28.9 | 28.9 | 34.8 | 34.8 | 20.0 | 20.0 | 35.0 | 35.0 | 22.2 | 22.2 |
| DEX0448_040.nt.7 | 40756.0 | 31.6 | 31.6 | 34.8 | 34.8 | 26.7 | 26.7 | 40.0 | 40.0 | 22.2 | 22.2 |
| DEX0448_041.nt.1 | 32216.0 | 52.6 | 52.6 | 52.2 | 52.2 | 53.3 | 53.3 | 55.0 | 55.0 | 50.0 | 50.0 |
| DEX0448_042.nt.1 | 29231.0 | 15.8 | 16.2 | 13.0 | 13.0 | 20.0 | 21.4 | 20.0 | 21.1 | 11.1 | 11.1 |
| DEX0448_042.nt.1 | 29232.0 | 15.8 | 15.8 | 13.0 | 13.0 | 20.0 | 20.0 | 20.0 | 20.0 | 11.1 | 11.1 |
| DEX0448_042.nt.1 | 29271.0 | 23.7 | 23.7 | 21.7 | 21.7 | 26.7 | 26.7 | 30.0 | 30.0 | 16.7 | 16.7 |
| DEX0448_042.nt.1 | 29272.0 | 26.3 | 26.3 | 21.7 | 21.7 | 33.3 | 33.3 | 30.0 | 30.0 | 22.2 | 22.2 |
| DEX0448_042.nt.1 | 29290.0 | 31.6 | 31.6 | 30.4 | 30.4 | 33.3 | 33.3 | 45.0 | 45.0 | 16.7 | 16.7 |
| DEX0448_043.nt.1 | 9043.0 | 18.4 | 18.4 | 21.7 | 21.7 | 13.3 | 13.3 | 15.0 | 15.0 | 22.2 | 22.2 |
| DEX0448_044.nt.1 | 36803.0 | 28.9 | 28.9 | 17.4 | 17.4 | 46.7 | 46.7 | 25.0 | 25.0 | 33.3 | 33.3 |

[0472] TABLE 2

| | | | | | | | | Cln | Cln |
|---|---|---|---|---|---|---|---|---|---|
| | | | Cln | | Cln | Cln | Cln TS | NOT | NOT TS |
| | | Cln | GR1, 2 | Cln | GR3 | TS | up | TS | up |
| | | GR1, 2 | % valid | GR3 | % valid | up | % valid | up | % valid |
| | Oligo | % up | up | % up | up | % up | up | % up | up |
| DEX ID | Name | n = 28 | n = 28 | n = 10 | n = 10 | n = 13 | n = 13 | n = 25 | n = 25 |
| DEX0448_001.nt.1 | 34940.0 | 17.9 | 17.9 | 40.0 | 40.0 | 46.2 | 46.2 | 12.0 | 12.0 |
| DEX0448_002.nt.1 | 39957.0 | 50.0 | 50.0 | 60.0 | 60.0 | 69.2 | 69.2 | 44.0 | 44.0 |
| DEX0448_002.nt.1 | 39958.0 | 42.9 | 42.9 | 50.0 | 50.0 | 61.5 | 61.5 | 36.0 | 36.0 |
| DEX0448_003.nt.1 | 32057.0 | 7.1 | 7.1 | 50.0 | 50.0 | 38.5 | 38.5 | 8.0 | 8.0 |
| DEX0448_004.nt.1 | 41210.0 | 10.7 | 10.7 | 50.0 | 50.0 | 38.5 | 38.5 | 12.0 | 12.0 |
| DEX0448_005.nt.2 | 36243.0 | 35.7 | 35.7 | 30.0 | 30.0 | 46.2 | 46.2 | 28.0 | 28.0 |
| DEX0448_006.nt.1 | 8410.0 | 14.3 | 14.3 | 10.0 | 10.0 | 30.8 | 30.8 | 4.0 | 4.0 |
| DEX0448_007.nt.1 | 26449.0 | 3.6 | 3.7 | 30.0 | 30.0 | 15.4 | 15.4 | 8.0 | 8.3 |
| DEX0448_008.nt.1 | 32851.0 | 28.6 | 28.6 | 30.0 | 30.0 | 46.2 | 46.2 | 20.0 | 20.0 |
| DEX0448_009.nt.1 | 34680.0 | 57.1 | 66.7 | 50.0 | 50.0 | 38.5 | 41.7 | 64.0 | 72.7 |
| DEX0448_009.nt.1 | 40809.0 | 64.3 | 64.3 | 40.0 | 40.0 | 30.8 | 30.8 | 72.0 | 72.0 |
| DEX0448_009.nt.1 | 40810.0 | 64.3 | 64.3 | 40.0 | 40.0 | 30.8 | 30.8 | 72.0 | 72.0 |
| DEX0448_010.nt.1 | 28423.0 | 10.7 | 11.1 | 40.0 | 40.0 | 23.1 | 23.1 | 16.0 | 16.7 |
| DEX0448_011.nt.1 | 8312.0 | 3.6 | 3.7 | 0.0 | 0.0 | 0.0 | 0.0 | 4.0 | 4.3 |
| DEX0448_013.nt.1 | 16006.0 | 10.7 | 10.7 | 40.0 | 40.0 | 38.5 | 38.5 | 8.0 | 8.0 |
| DEX0448_014.nt.1 | 37376.0 | 25.0 | 25.0 | 20.0 | 20.0 | 7.7 | 7.7 | 32.0 | 32.0 |
| DEX0448_014.nt.1 | 37378.0 | 21.4 | 21.4 | 20.0 | 20.0 | 7.7 | 7.7 | 28.0 | 28.0 |
| DEX0448_015.nt.1 | 33348.0 | 28.6 | 28.6 | 50.0 | 50.0 | 38.5 | 38.5 | 32.0 | 32.0 |
| DEX0448_015.nt.1 | 38996.0 | 32.1 | 32.1 | 20.0 | 22.2 | 15.4 | 15.4 | 36.0 | 37.5 |
| DEX0448_017.nt.1 | 36179.0 | 17.9 | 18.5 | 10.0 | 11.1 | 7.7 | 8.3 | 20.0 | 20.8 |
| DEX0448_017.nt.1 | 36180.0 | 10.7 | 11.1 | 10.0 | 11.1 | 7.7 | 8.3 | 12.0 | 12.5 |
| DEX0448_017.nt.1 | 36181.0 | 0.0 | 0.0 | 0.0 | 0.0 | 0.0 | 0.0 | 0.0 | 0.0 |
| DEX0448_017.nt.1 | 36182.0 | 3.6 | 4.2 | 0.0 | 0.0 | 7.7 | 10.0 | 0.0 | 0.0 |
| DEX0448_017.nt.1 | 36184.0 | 39.3 | 39.3 | 30.0 | 30.0 | 46.2 | 46.2 | 32.0 | 32.0 |
| DEX0448_017.nt.1 | 37227.0 | 7.1 | 8.3 | 0.0 | 0.0 | 7.7 | 11.1 | 4.0 | 4.5 |
| DEX0448_017.nt.1 | 37228.0 | 3.6 | 4.0 | 0.0 | 0.0 | 7.7 | 10.0 | 0.0 | 0.0 |
| DEX0448_017.nt.1 | 37239.0 | 28.6 | 28.6 | 30.0 | 30.0 | 38.5 | 38.5 | 24.0 | 24.0 |
| DEX0448_017.nt.1 | 37240.0 | 32.1 | 33.3 | 40.0 | 40.0 | 46.2 | 46.2 | 28.0 | 29.2 |
| DEX0448_017.nt.1 | 37895.0 | 7.1 | 16.7 | 0.0 | 0.0 | 0.0 | 0.0 | 8.0 | 15.4 |
| DEX0448_018.nt.1 | 41823.0 | 25.0 | 25.0 | 20.0 | 20.0 | 30.8 | 30.8 | 20.0 | 20.0 |
| DEX0448_018.nt.1 | 41824.0 | 14.3 | 14.3 | 20.0 | 20.0 | 23.1 | 23.1 | 12.0 | 12.0 |
| DEX0448_020.nt.1 | 39655.0 | 42.9 | 42.9 | 50.0 | 50.0 | 61.5 | 61.5 | 36.0 | 36.0 |
| DEX0448_020.nt.1 | 39656.0 | 21.4 | 21.4 | 40.0 | 40.0 | 30.8 | 30.8 | 24.0 | 24.0 |
| DEX0448_021.nt.1 | 30819.0 | 0.0 | 0.0 | 0.0 | 0.0 | 0.0 | 0.0 | 0.0 | 0.0 |
| DEX0448_021.nt.1 | 30870.0 | 0.0 | 0.0 | 0.0 | 0.0 | 0.0 | 0.0 | 0.0 | 0.0 |
| DEX0448_021.nt.1 | 30931.0 | 0.0 | 0.0 | 0.0 | 0.0 | 0.0 | 0.0 | 0.0 | 0.0 |
| DEX0448_021.nt.1 | 31146.0 | 0.0 | 0.0 | 0.0 | 0.0 | 0.0 | 0.0 | 0.0 | 0.0 |
| DEX0448_021.nt.1 | 32154.0 | 0.0 | 0.0 | 30.0 | 30.0 | 15.4 | 15.4 | 4.0 | 4.0 |
| DEX0448_021.nt.1 | 31155.0 | 0.0 | 0.0 | 30.0 | 33.3 | 23.1 | 23.1 | 0.0 | 0.0 |
| DEX0448_021.nt.1 | 31157.0 | 0.0 | 0.0 | 10.0 | 10.0 | 7.7 | 7.7 | 0.0 | 0.0 |
| DEX0448_021.nt.1 | 35218.0 | 0.0 | 0.0 | 0.0 | 0.0 | 0.0 | 0.0 | 0.0 | 0.0 |
| DEX0448_021.nt.2 | 30819.0 | 0.0 | 0.0 | 0.0 | 0.0 | 0.0 | 0.0 | 0.0 | 0.0 |
| DEX0448_021.nt.2 | 30870.0 | 0.0 | 0.0 | 0.0 | 0.0 | 0.0 | 0.0 | 0.0 | 0.0 |
| DEX0448_021.nt.2 | 30931.0 | 0.0 | 0.0 | 0.0 | 0.0 | 0.0 | 0.0 | 0.0 | 0.0 |
| DEX0448_021.nt.2 | 31146.0 | 0.0 | 0.0 | 0.0 | 0.0 | 0.0 | 0.0 | 0.0 | 0.0 |
| DEX0448_021.nt.2 | 31154.0 | 0.0 | 0.0 | 30.0 | 30.0 | 15.4 | 15.4 | 4.0 | 4.0 |
| DEX0448_021.nt.2 | 31155.0 | 0.0 | 0.0 | 30.0 | 33.3 | 23.1 | 23.1 | 0.0 | 0.0 |
| DEX0448_021.nt.2 | 31157.0 | 0.0 | 0.0 | 10.0 | 10.0 | 7.7 | 7.7 | 0.0 | 0.0 |
| DEX0448_021.nt.2 | 35218.0 | 0.0 | 0.0 | 0.0 | 0.0 | 0.0 | 0.0 | 0.0 | 0.0 |
| DEX0448_021.nt.3 | 30819.0 | 0.0 | 0.0 | 0.0 | 0.0 | 0.0 | 0.0 | 0.0 | 0.0 |
| DEX0448_021.nt.3 | 30870.0 | 0.0 | 0.0 | 0.0 | 0.0 | 0.0 | 0.0 | 0.0 | 0.0 |
| DEX0448_021.nt.3 | 31154.0 | 0.0 | 0.0 | 30.0 | 30.0 | 15.4 | 15.4 | 4.0 | 4.0 |
| DEX0448_021.nt.3 | 31157.0 | 0.0 | 0.0 | 10.0 | 10.0 | 7.7 | 7.7 | 0.0 | 0.0 |
| DEX0448_021.nt.3 | 35218.0 | 0.0 | 0.0 | 0.0 | 0.0 | 0.0 | 0.0 | 0.0 | 0.0 |
| DEX0448_022.nt.1 | 36878.0 | 39.3 | 40.7 | 30.0 | 30.0 | 38.5 | 38.5 | 36.0 | 37.5 |
| DEX0448_022.nt.1 | 37415.0 | 46.4 | 46.4 | 70.0 | 70.0 | 46.2 | 46.2 | 56.0 | 56.0 |
| DEX0448_022.nt.2 | 36878.0 | 39.3 | 40.7 | 30.0 | 30.0 | 38.5 | 38.5 | 36.0 | 37.5 |
| DEX0448_022.nt.2 | 37415.0 | 46.4 | 46.4 | 70.0 | 70.0 | 46.2 | 46.2 | 56.0 | 56.0 |
| DEX0448_023.nt.1 | 22297.0 | 17.9 | 17.9 | 30.0 | 30.0 | 38.5 | 38.5 | 12.0 | 12.0 |
| DEX0448_024.nt.1 | 19607.0 | 32.1 | 32.1 | 50.0 | 50.0 | 46.2 | 46.2 | 32.0 | 32.0 |
| DEX0448_025.nt.1 | 40033.0 | 85.7 | 85.7 | 70.0 | 70.0 | 76.9 | 76.9 | 84.0 | 84.0 |
| DEX0448_025.nt.1 | 40034.0 | 82.1 | 82.1 | 70.0 | 70.0 | 76.9 | 76.9 | 80.0 | 80.0 |
| DEX0448_026.nt.1 | 41210.0 | 10.7 | 10.7 | 50.0 | 50.0 | 38.5 | 38.5 | 12.0 | 12.0 |
| DEX0448_026.nt.1 | 41284.0 | 7.1 | 7.1 | 0.0 | 0.0 | 0.0 | 0.0 | 8.0 | 8.0 |
| DEX0448_026.nt.2 | 41210.0 | 10.7 | 10.7 | 50.0 | 50.0 | 38.5 | 38.5 | 12.0 | 12.0 |
| DEX0448_026.nt.2 | 41284.0 | 7.1 | 7.1 | 0.0 | 0.0 | 0.0 | 0.0 | 8.0 | 8.0 |
| DEX0448_027.nt.1 | 9622.0 | 14.3 | 14.3 | 20.0 | 20.0 | 30.8 | 30.8 | 8.0 | 8.0 |
| DEX0448_027.nt.1 | 9623.0 | 14.3 | 14.3 | 20.0 | 20.0 | 30.8 | 30.8 | 8.0 | 8.0 |
| DEX0448_027.nt.2 | 9622.0 | 14.3 | 14.3 | 20.0 | 20.0 | 30.8 | 30.8 | 8.0 | 8.0 |
| DEX0448_027.nt.2 | 9623.0 | 14.3 | 14.3 | 20.0 | 20.0 | 30.8 | 30.8 | 8.0 | 8.0 |
| DEX0448_027.nt.3 | 9622.0 | 14.3 | 14.3 | 20.0 | 20.0 | 30.8 | 30.8 | 8.0 | 8.0 |
| DEX0448_027.nt.3 | 9623.0 | 14.3 | 14.3 | 20.0 | 20.0 | 30.8 | 30.8 | 8.0 | 8.0 |
| DEX0448_027.nt.4 | 9622.0 | 14.3 | 14.3 | 20.0 | 20.0 | 30.8 | 30.8 | 8.0 | 8.0 |
| DEX0448_027.nt.4 | 9623.0 | 14.3 | 14.3 | 20.0 | 20.0 | 30.8 | 30.8 | 8.0 | 8.0 |
| DEX0448_027.nt.5 | 9622.0 | 14.3 | 14.3 | 20.0 | 20.0 | 30.8 | 30.8 | 8.0 | 8.0 |
| DEX0448_027.nt.5 | 9623.0 | 14.3 | 14.3 | 20.0 | 20.0 | 30.8 | 30.8 | 8.0 | 8.0 |
| DEX0448_027.nt.6 | 9622.0 | 14.3 | 14.3 | 20.0 | 20.0 | 30.8 | 30.8 | 8.0 | 8.0 |
| DEX0448_027.nt.6 | 9623.0 | 14.3 | 14.3 | 20.0 | 20.0 | 30.8 | 30.8 | 8.0 | 8.0 |
| DEX0448_029.nt.1 | 28733.0 | 0.0 | 0.0 | 0.0 | 0.0 | 0.0 | 0.0 | 0.0 | 0.0 |
| DEX0448_029.nt.1 | 28734.0 | 3.6 | 3.6 | 40.0 | 40.0 | 15.4 | 15.4 | 12.0 | 12.0 |
| DEX0448_029.nt.1 | 38381.0 | 0.0 | 0.0 | 10.0 | 11.1 | 7.7 | 7.7 | 0.0 | 0.0 |
| DEX0448_029.nt.1 | 38382.0 | 0.0 | 0.0 | 0.0 | 0.0 | 0.0 | 0.0 | 0.0 | 0.0 |
| DEX0448_029.nt.1 | 38383.0 | 0.0 | 0.0 | 10.0 | 10.0 | 0.0 | 0.0 | 4.0 | 4.0 |
| DEX0448_029.nt.1 | 38384.0 | 0.0 | 0.0 | 10.0 | 10.0 | 0.0 | 0.0 | 4.0 | 4.0 |
| DEX0448_029.nt.2 | 28733.0 | 0.0 | 0.0 | 0.0 | 0.0 | 0.0 | 0.0 | 0.0 | 0.0 |
| DEX0448_029.nt.2 | 28734.0 | 3.6 | 3.6 | 40.0 | 40.0 | 15.4 | 15.4 | 12.0 | 12.0 |
| DEX0448_029.nt.2 | 38381.0 | 0.0 | 0.0 | 10.0 | 11.1 | 7.7 | 7.7 | 0.0 | 0.0 |
| DEX0448_029.nt.2 | 38382.0 | 0.0 | 0.0 | 0.0 | 0.0 | 0.0 | 0.0 | 0.0 | 0.0 |
| DEX0448_029.nt.2 | 38383.0 | 0.0 | 0.0 | 10.0 | 10.0 | 0.0 | 0.0 | 4.0 | 4.0 |
| DEX0448_029.nt.2 | 38384.0 | 0.0 | 0.0 | 10.0 | 10.0 | 0.0 | 0.0 | 4.0 | 4.0 |
| DEX0448_029.nt.3 | 28733.0 | 0.0 | 0.0 | 0.0 | 0.0 | 0.0 | 0.0 | 0.0 | 0.0 |
| DEX0448_029.nt.3 | 28734.0 | 3.6 | 3.6 | 40.0 | 40.0 | 15.4 | 15.4 | 12.0 | 12.0 |
| DEX0448_029.nt.3 | 38381.0 | 0.0 | 0.0 | 10.0 | 11.1 | 7.7 | 7.7 | 0.0 | 0.0 |
| DEX0448_029.nt.3 | 38382.0 | 0.0 | 0.0 | 0.0 | 0.0 | 0.0 | 0.0 | 0.0 | 0.0 |
| DEX0448_029.nt.3 | 38383.0 | 0.0 | 0.0 | 10.0 | 10.0 | 0.0 | 0.0 | 4.0 | 4.0 |
| DEX0448_029.nt.3 | 38384.0 | 0.0 | 0.0 | 10.0 | 10.0 | 0.0 | 0.0 | 4.0 | 4.0 |
| DEX0448_029.nt.4 | 28733.0 | 0.0 | 0.0 | 0.0 | 0.0 | 0.0 | 0.0 | 0.0 | 0.0 |
| DEX0448_029.nt.4 | 28734.0 | 3.6 | 3.6 | 40.0 | 40.0 | 15.4 | 15.4 | 12.0 | 12.0 |
| DEX0448_029.nt.4 | 38381.0 | 0.0 | 0.0 | 10.0 | 11.1 | 7.7 | 7.7 | 0.0 | 0.0 |
| DEX0448_029.nt.4 | 38382.0 | 0.0 | 0.0 | 0.0 | 0.0 | 0.0 | 0.0 | 0.0 | 0.0 |
| DEX0448_029.nt.4 | 38383.0 | 0.0 | 0.0 | 10.0 | 10.0 | 0.0 | 0.0 | 4.0 | 4.0 |
| DEX0448_029.nt.4 | 38384.0 | 0.0 | 0.0 | 10.0 | 10.0 | 0.0 | 0.0 | 4.0 | 4.0 |
| DEX0448_029.nt.5 | 28733.0 | 0.0 | 0.0 | 0.0 | 0.0 | 0.0 | 0.0 | 0.0 | 0.0 |
| DEX0448_029.nt.5 | 28734.0 | 3.6 | 3.6 | 40.0 | 40.0 | 15.4 | 15.4 | 12.0 | 12.0 |
| DEX0448_029.nt.5 | 38381.0 | 0.0 | 0.0 | 10.0 | 11.1 | 7.7 | 7.7 | 0.0 | 0.0 |
| DEX0448_029.nt.5 | 38382.0 | 0.0 | 0.0 | 0.0 | 0.0 | 0.0 | 0.0 | 0.0 | 0.0 |
| DEX0448_029.nt.5 | 38383.0 | 0.0 | 0.0 | 10.0 | 10.0 | 0.0 | 0.0 | 4.0 | 4.0 |
| DEX0448_029.nt.5 | 38384.0 | 0.0 | 0.0 | 10.0 | 10.0 | 0.0 | 0.0 | 4.0 | 4.0 |
| DEX0448_029.nt.6 | 28733.0 | 0.0 | 0.0 | 0.0 | 0.0 | 0.0 | 0.0 | 0.0 | 0.0 |
| DEX0448_029.nt.6 | 28734.0 | 3.6 | 3.6 | 40.0 | 40.0 | 15.4 | 15.4 | 12.0 | 12.0 |
| DEX0448_029.nt.6 | 38381.0 | 0.0 | 0.0 | 10.0 | 11.1 | 7.7 | 7.7 | 0.0 | 0.0 |
| DEX0448_029.nt.6 | 38382.0 | 0.0 | 0.0 | 0.0 | 0.0 | 0.0 | 0.0 | 0.0 | 0.0 |
| DEX0448_029.nt.6 | 38383.0 | 0.0 | 0.0 | 10.0 | 10.0 | 0.0 | 0.0 | 4.0 | 4.0 |
| DEX0448_029.nt.6 | 38384.0 | 0.0 | 0.0 | 10.0 | 10.0 | 0.0 | 0.0 | 4.0 | 4.0 |
| DEX0448_029.nt.7 | 28733.0 | 0.0 | 0.0 | 0.0 | 0.0 | 0.0 | 0.0 | 0.0 | 0.0 |
| DEX0448_029.nt.7 | 28734.0 | 3.6 | 3.6 | 40.0 | 40.0 | 15.4 | 15.4 | 12.0 | 12.0 |
| DEX0448_029.nt.7 | 38381.0 | 0.0 | 0.0 | 10.0 | 11.1 | 7.7 | 7.7 | 0.0 | 0.0 |
| DEX0448_029.nt.7 | 38382.0 | 0.0 | 0.0 | 0.0 | 0.0 | 0.0 | 0.0 | 0.0 | 0.0 |
| DEX0448_029.nt.7 | 38383.0 | 0.0 | 0.0 | 10.0 | 10.0 | 0.0 | 0.0 | 4.0 | 4.0 |
| DEX0448_029.nt.7 | 38384.0 | 0.0 | 0.0 | 10.0 | 10.0 | 0.0 | 0.0 | 4.0 | 4.0 |
| DEX0448_030.nt.1 | 29603.0 | 3.6 | 3.6 | 10.0 | 10.0 | 0.0 | 0.0 | 8.0 | 8.0 |
| DEX0448_030.nt.1 | 29604.0 | 7.1 | 7.4 | 10.0 | 10.0 | 0.0 | 0.0 | 12.0 | 12.5 |
| DEX0448_030.nt.1 | 40867.0 | 7.1 | 8.0 | 20.0 | 20.0 | 15.4 | 16.7 | 8.0 | 8.7 |
| DEX0448_030.nt.1 | 40868.0 | 7.1 | 7.1 | 30.0 | 30.0 | 15.4 | 15.4 | 12.0 | 12.0 |
| DEX0448_032.nt.1 | 36179.0 | 17.9 | 18.5 | 10.0 | 11.1 | 7.7 | 8.3 | 20.0 | 20.8 |
| DEX0448_032.nt.1 | 36180.0 | 10.7 | 11.1 | 10.0 | 11.1 | 7.7 | 8.3 | 12.0 | 12.5 |
| DEX0448_032.nt.1 | 36182.0 | 3.6 | 4.2 | 0.0 | 0.0 | 7.7 | 10.0 | 0.0 | 0.0 |
| DEX0448_032.nt.1 | 36184.0 | 39.3 | 39.3 | 30.0 | 30.0 | 46.2 | 46.2 | 32.0 | 32.0 |
| DEX0448_032.nt.1 | 37227.0 | 7.1 | 8.3 | 0.0 | 0.0 | 7.7 | 11.1 | 4.0 | 4.5 |
| DEX0448_032.nt.1 | 37228.0 | 3.6 | 4.0 | 0.0 | 0.0 | 7.7 | 10.0 | 0.0 | 0.0 |
| DEX0448_032.nt.1 | 37239.0 | 28.6 | 28.6 | 30.0 | 30.0 | 38.5 | 38.5 | 24.0 | 24.0 |
| DEX0448_032.nt.1 | 37240.0 | 32.1 | 33.3 | 40.0 | 40.0 | 46.2 | 46.2 | 28.0 | 29.2 |
| DEX0448_035.nt.1 | 23862.0 | 14.3 | 14.3 | 30.0 | 30.0 | 23.1 | 23.1 | 16.0 | 16.0 |
| DEX0448_035.nt.1 | 23863.0 | 25.0 | 25.0 | 30.0 | 30.0 | 30.8 | 30.8 | 24.0 | 24.0 |
| DEX0448_035.nt.2 | 23862.0 | 14.3 | 14.3 | 30.0 | 30.0 | 23.1 | 23.1 | 16.0 | 16.0 |
| DEX0448_035.nt.2 | 23863.0 | 25.0 | 25.0 | 30.0 | 30.0 | 30.8 | 30.8 | 24.0 | 24.0 |
| DEX0448_035.nt.3 | 23862.0 | 14.3 | 14.3 | 30.0 | 30.0 | 23.1 | 23.1 | 16.0 | 16.0 |
| DEX0448_035.nt.3 | 23863.0 | 25.0 | 25.0 | 30.0 | 30.0 | 30.8 | 30.8 | 24.0 | 24.0 |
| DEX0448_035.nt.4 | 23862.0 | 14.3 | 14.3 | 30.0 | 30.0 | 23.1 | 23.1 | 16.0 | 16.0 |
| DEX0448_035.nt.4 | 23863.0 | 25.0 | 25.0 | 30.0 | 30.0 | 30.8 | 30.8 | 24.0 | 24.0 |
| DEX0448_036.nt.1 | 29532.0 | 17.9 | 17.9 | 50.0 | 50.0 | 38.5 | 38.5 | 20.0 | 20.0 |
| DEX0448_036.nt.1 | 29533.0 | 0.0 | 0.0 | 0.0 | 0.0 | 0.0 | 0.0 | 0.0 | 0.0 |
| DEX0448_036.nt.1 | 29534.0 | 0.0 | 0.0 | 0.0 | 0.0 | 0.0 | 0.0 | 0.0 | 0.0 |
| DEX0448_036.nt.1 | 29540.0 | 0.0 | 0.0 | 0.0 | 0.0 | 0.0 | 0.0 | 0.0 | 0.0 |
| DEX0448_036.nt.1 | 36811.0 | 0.0 | 0.0 | 0.0 | 0.0 | 0.0 | 0.0 | 0.0 | 0.0 |
| DEX0448_036.nt.1 | 36812.0 | 0.0 | 0.0 | 10.0 | 12.5 | 7.7 | 11.1 | 0.0 | 0.0 |
| DEX0448_036.nt.2 | 29532.0 | 17.9 | 17.9 | 50.0 | 50.0 | 38.5 | 38.5 | 20.0 | 20.0 |
| DEX0448_036.nt.2 | 29539.0 | 0.0 | 0.0 | 10.0 | 11.1 | 7.7 | 7.7 | 0.0 | 0.0 |
| DEX0448_036.nt.2 | 29540.0 | 0.0 | 0.0 | 0.0 | 0.0 | 0.0 | 0.0 | 0.0 | 0.0 |
| DEX0448_036.nt.3 | 29532.0 | 17.9 | 17.9 | 50.0 | 50.0 | 38.5 | 38.5 | 20.0 | 20.0 |
| DEX0448_036.nt.3 | 29539.0 | 0.0 | 0.0 | 10.0 | 11.1 | 7.7 | 7.7 | 0.0 | 0.0 |
| DEX0448_036.nt.3 | 29540.0 | 0.0 | 0.0 | 0.0 | 0.0 | 0.0 | 0.0 | 0.0 | 0.0 |
| DEX0448_037.nt.1 | 36341.0 | 7.1 | 7.1 | 20.0 | 20.0 | 30.8 | 30.8 | 0.0 | 0.0 |
| DEX0448_037.nt.1 | 36342.0 | 3.6 | 3.8 | 20.0 | 20.0 | 23.1 | 25.0 | 0.0 | 0.0 |
| DEX0448_037.nt.2 | 36341.0 | 7.1 | 7.1 | 20.0 | 20.0 | 30.8 | 30.8 | 0.0 | 0.0 |
| DEX0448_037.nt.2 | 36342.0 | 3.6 | 3.8 | 20.0 | 20.0 | 23.1 | 25.0 | 0.0 | 0.0 |
| DEX0448_037.nt.3 | 36341.0 | 7.1 | 7.1 | 20.0 | 20.0 | 30.8 | 30.8 | 0.0 | 0.0 |
| DEX0448_037.nt.3 | 36342.0 | 3.6 | 3.8 | 20.0 | 20.0 | 23.1 | 25.0 | 0.0 | 0.0 |
| DEX0448_037.nt.4 | 36341.0 | 7.1 | 7.1 | 20.0 | 20.0 | 30.8 | 30.8 | 0.0 | 0.0 |
| DEX0448_037.nt.4 | 36342.0 | 3.6 | 3.8 | 20.0 | 20.0 | 23.1 | 25.0 | 0.0 | 0.0 |
| DEX0448_037.nt.5 | 36341.0 | 7.1 | 7.1 | 20.0 | 20.0 | 30.8 | 30.8 | 0.0 | 0.0 |
| DEX0448_037.nt.5 | 36342.0 | 3.6 | 3.8 | 20.0 | 20.0 | 23.1 | 25.0 | 0.0 | 0.0 |
| DEX0448_037.nt.6 | 36341.0 | 7.1 | 7.1 | 20.0 | 20.0 | 30.8 | 30.8 | 0.0 | 0.0 |
| DEX0448_037.nt.6 | 36342.0 | 3.6 | 3.8 | 20.0 | 20.0 | 23.1 | 25.0 | 0.0 | 0.0 |
| DEX0448_038.nt.1 | 20895.0 | 28.6 | 28.6 | 30.0 | 33.3 | 84.6 | 91.7 | 0.0 | 0.0 |
| DEX0448_038.nt.1 | 20896.0 | 28.6 | 28.6 | 40.0 | 40.0 | 92.3 | 92.3 | 0.0 | 0.0 |
| DEX0448_039.nt.1 | 38855.0 | 28.6 | 28.6 | 50.0 | 50.0 | 23.1 | 23.1 | 40.0 | 40.0 |
| DEX0448_040.nt.1 | 31347.0 | 32.1 | 33.3 | 30.0 | 30.0 | 53.8 | 53.8 | 20.0 | 20.8 |
| DEX0448_040.nt.1 | 40755.0 | 28.6 | 28.6 | 30.0 | 30.0 | 53.8 | 53.8 | 16.0 | 16.0 |
| DEX0448_040.nt.1 | 40756.0 | 32.1 | 32.1 | 30.0 | 30.0 | 53.8 | 53.8 | 20.0 | 20.0 |
| DEX0448_040.nt.2 | 31346.0 | 35.7 | 35.7 | 40.0 | 40.0 | 61.5 | 61.5 | 24.0 | 24.0 |
| DEX0448_040.nt.2 | 31347.0 | 32.1 | 33.3 | 30.0 | 30.0 | 53.8 | 53.8 | 20.0 | 20.8 |
| DEX0448_040.nt.2 | 40755.0 | 28.6 | 28.6 | 30.0 | 30.0 | 53.8 | 53.8 | 16.0 | 16.0 |
| DEX0448_040.nt.2 | 40756.0 | 32.1 | 32.1 | 30.0 | 30.0 | 53.8 | 53.8 | 20.0 | 20.0 |
| DEX0448_040.nt.3 | 31346.0 | 35.7 | 35.7 | 40.0 | 40.0 | 61.5 | 61.5 | 24.0 | 24.0 |
| DEX0448_040.nt.3 | 31347.0 | 32.1 | 33.3 | 30.0 | 30.0 | 53.8 | 53.8 | 20.0 | 20.8 |
| DEX0448_040.nt.3 | 40755.0 | 28.6 | 28.6 | 30.0 | 30.0 | 53.8 | 53.8 | 16.0 | 16.0 |
| DEX0448_040.nt.3 | 40756.0 | 32.1 | 32.1 | 30.0 | 30.0 | 53.8 | 53.8 | 20.0 | 20.0 |
| DEX0448_040.nt.4 | 31346.0 | 35.7 | 35.7 | 40.0 | 40.0 | 61.5 | 61.5 | 24.0 | 24.0 |
| DEX0448_040.nt.4 | 31347.0 | 32.1 | 33.3 | 30.0 | 30.0 | 53.8 | 53.8 | 20.0 | 20.8 |
| DEX0448_040.nt.4 | 40755.0 | 28.6 | 28.6 | 30.0 | 30.0 | 53.8 | 53.8 | 16.0 | 16.0 |
| DEX0448_040.nt.4 | 40756.0 | 32.1 | 32.1 | 30.0 | 30.0 | 53.8 | 53.8 | 20.0 | 20.0 |
| DEX0448_040.nt.5 | 31346.0 | 35.7 | 35.7 | 40.0 | 40.0 | 61.5 | 61.5 | 24.0 | 24.0 |
| DEX0448_040.nt.5 | 31347.0 | 32.1 | 33.3 | 30.0 | 30.0 | 53.8 | 53.8 | 20.0 | 20.8 |
| DEX0448_040.nt.5 | 40755.0 | 28.6 | 28.6 | 30.0 | 30.0 | 53.8 | 53.8 | 16.0 | 16.0 |
| DEX0448_040.nt.5 | 40756.0 | 32.1 | 32.1 | 30.0 | 30.0 | 53.8 | 53.8 | 20.0 | 20.0 |
| DEX0448_040.nt.6 | 31346.0 | 35.7 | 35.7 | 40.0 | 40.0 | 61.5 | 61.5 | 24.0 | 24.0 |
| DEX0448_040.nt.6 | 31347.0 | 32.1 | 33.3 | 30.0 | 30.0 | 53.8 | 53.8 | 20.0 | 20.8 |
| DEX0448_040.nt.6 | 35943.0 | 0.0 | 0.0 | 0.0 | 0.0 | 0.0 | 0.0 | 0.0 | 0.0 |
| DEX0448_040.nt.6 | 35944.0 | 0.0 | 0.0 | 0.0 | 0.0 | 0.0 | 0.0 | 0.0 | 0.0 |
| DEX0448_040.nt.6 | 40755.0 | 28.6 | 28.6 | 30.0 | 30.0 | 53.8 | 53.8 | 16.0 | 16.0 |
| DEX0448_040.nt.6 | 40756.0 | 32.1 | 32.1 | 30.0 | 30.0 | 53.8 | 53.8 | 20.0 | 20.0 |
| DEX0448_040.nt.7 | 31346.0 | 35.7 | 35.7 | 40.0 | 40.0 | 61.5 | 61.5 | 24.0 | 24.0 |
| DEX0448_040.nt.7 | 31347.0 | 32.1 | 33.3 | 30.0 | 30.0 | 53.8 | 53.8 | 20.0 | 20.8 |
| DEX0448_040.nt.7 | 40755.0 | 28.6 | 28.6 | 30.0 | 30.0 | 53.8 | 53.8 | 16.0 | 16.0 |
| DEX0448_040.nt.7 | 40756.0 | 32.1 | 32.1 | 30.0 | 30.0 | 53.8 | 53.8 | 20.0 | 20.0 |
| DEX0448_041.nt.1 | 32216.0 | 50.0 | 50.0 | 60.0 | 60.0 | 61.5 | 61.5 | 48.0 | 48.0 |
| DEX0448_042.nt.1 | 29231.0 | 17.9 | 18.5 | 10.0 | 10.0 | 23.1 | 23.1 | 12.0 | 12.5 |
| DEX0448_042.nt.1 | 29232.0 | 17.9 | 17.9 | 10.0 | 10.0 | 15.4 | 15.4 | 16.0 | 16.0 |
| DEX0448_042.nt.1 | 29271.0 | 21.4 | 21.4 | 30.0 | 30.0 | 30.8 | 30.8 | 20.0 | 20.0 |
| DEX0448_042.nt.1 | 29272.0 | 21.4 | 21.4 | 40.0 | 40.0 | 30.8 | 30.8 | 24.0 | 24.0 |
| DEX0448_042.nt.1 | 29290.0 | 32.1 | 32.1 | 30.0 | 30.0 | 46.2 | 46.2 | 24.0 | 24.0 |
| DEX0448_043.nt.1 | 9043.0 | 14.3 | 14.3 | 30.0 | 30.0 | 23.1 | 23.1 | 16.0 | 16.0 |
| DEX0448_044.nt.1 | 36803.0 | 32.1 | 32.1 | 20.0 | 20.0 | 0.0 | 0.0 | 44.0 | 44.0 |

[0473] TABLE 3

| | | | Cln | | Cln | | Cln |
|---|---|---|---|---|---|---|---|
| | | Cln | Multi- | Cln | Multi- | Cln | Multi- |
| | | Multi- | Cancer | Multi- | Cancer | Multi- | Cancer |
| | | Cancer | ALL | Cancer | ASC | Cancer | RS |
| | Oligo | ALL % up | % valid | ASC % up | % valid | RS % up | % valid |
| DEX ID | Name | n = 27 | up n = 27 | n = 14 | up n = 14 | n = 13 | up n = 13 |
| DEX0448_016.nt.1 | 5354.0 | 11.1 | 17.6 | 0.0 | 0.0 | 23.1 | 42.9 |
| DEX0448_019.nt.1 | 1045.0 | 25.9 | 25.9 | 14.3 | 14.3 | 38.5 | 38.5 |
| DEX0448_026.nt.1 | 78479.0 | 18.5 | 20.8 | 35.7 | 41.7 | 0.0 | 0.0 |
| DEX0448_026.nt.1 | 78479.1 | 14.8 | 15.4 | 28.6 | 28.6 | 0.0 | 0.0 |
| DEX0448_026.nt.2 | 78479.0 | 18.5 | 20.8 | 35.7 | 41.7 | 0.0 | 0.0 |
| DEX0448_026.nt.2 | 78479.1 | 14.8 | 15.4 | 28.6 | 28.6 | 0.0 | 0.0 |
| DEX0448_028.nt.1 | 5305.0 | 14.8 | 14.8 | 28.6 | 28.6 | 0.0 | 0.0 |
| DEX0448_028.nt.1 | 5306.0 | 14.8 | 14.8 | 28.6 | 28.6 | 0.0 | 0.0 |
| DEX0448_028.nt.2 | 5305.0 | 14.8 | 14.8 | 28.6 | 28.6 | 0.0 | 0.0 |
| DEX0448_028.nt.2 | 5306.0 | 14.8 | 14.8 | 28.6 | 28.6 | 0.0 | 0.0 |
| DEX0448_034.nt.1 | 5354.0 | 11.1 | 17.6 | 0.0 | 0.0 | 23.1 | 42.9 |
| DEX0448_044.nt.1 | 42013.0 | 0.0 | 0.0 | 0.0 | 0.0 | 0.0 | 0.0 |
| DEX0448_044.nt.1 | 42013.1 | 0.0 | 0.0 | 0.0 | 0.0 | 0.0 | 0.0 |
| DEX0448_044.nt.1 | 42013.2 | 0.0 | 0.0 | 0.0 | 0.0 | 0.0 | 0.0 |

[0474] Breast Cancer Chips

[0475] For breast cancer two different chip designs were evaluated with overlapping sets of a total of 36 samples, comparing the expression patterns of breast cancer derived polyA+RNA to polyA+RNA isolated from a pool of 10 normal breast tissues. For the Breast Array Chip, all 36 samples (9 stage I cancers, 23 stage II cancers, 4 stage III cancers) were analyzed. These samples also represented 10 Grade1/2 and 26 Grade 3 cancers. The histopathologic grades for cancer are classified as follows: GX, cannot be assessed; G1, well differentiated; G2, moderately differentiated; G3, poorly differentiated; and G4, undifferentiated. AJCC Cancer Staging Handbook, pp. 9, (5th Ed, 1998). Samples were further grouped based on the expression patterns of the known breast cancer associated genes Her2 and ERα (10 HER2 up, 26 HER2 not up, 20 ER up and 16 ER not up) and for the Multi-Cancer Array Chip, a subset of 20 of these samples (9 stage I cancers, 8 stage II cancers, 3 stage III cancers) were assessed.

[0476] The results for the statistically significant up-regulated genes on the Breast Array Chip are shown in Tables 4 and 5. The results for the statistically significant up-regulated genes on the Multi-Cancer Array Chip are shown in Table 6. The first two columns of each table contain information about the sequence itself (Seq ID, Oligo Name), the next columns show the results obtained for all (“ALL”) breast cancer samples, cancers corresponding to stageI (“ST1”), stages II and III (“ST2,3”), grades 1 and 2 (“GR1,2”), grade 3 (“GR3”), cancers exhibiting up-regulation of Her2 (“HER2up”) or ERα (“ERup”) or those not exhibiting up-regulation of Her2 (“NOT HER2up”) or ERα (“NOT ERup”). ‘% up’ indicates the percentage of all experiments in which up-regulation of at least 2-fold was observed (n=36 for Colon Array Chip, n=20 for the Multi-Cancer Array Chip), ‘% valid up’ indicates the percentage of experiments with valid expression values in which up-regulation of at least 2-fold was observed.

TABLE 4

| | | | Mam | | Mam | | Mam | | Mam | | Mam |
|---|---|---|---|---|---|---|---|---|---|---|---|
| | | Mam | ALL % | Mam | ST1 % | Mam | ST2, 3 % | Mam | GR1, 2 % | Mam | GR3 % |
| | | ALL | valid | ST1 | valid | ST2, 3 | valid | GR1, 2 | valid | GR3 | valid |
| | Oligo | % up | up | % up | up | % up | up | % up | up | % up | up |
| DEX ID | Name | n = 36 | n = 36 | n = 9 | n = 9 | n = 27 | n = 27 | n = 10 | n = 10 | n = 26 | n = 26 |
| DEX0448_010.nt.1 | 17869.0 | 8.3 | 8.3 | 11.1 | 11.1 | 7.4 | 7.4 | 0.0 | 0.0 | 11.5 | 11.5 |
| DEX0448_010.nt.1 | 31466.0 | 8.3 | 8.3 | 0.0 | 0.0 | 11.1 | 11.1 | 0.0 | 0.0 | 11.5 | 11.5 |
| DEX0448_011.nt.1 | 20711.0 | 16.7 | 16.7 | 0.0 | 0.0 | 22.2 | 22.2 | 0.0 | 0.0 | 23.1 | 23.1 |
| DEX0448_016.nt.1 | 22545.0 | 0.0 | 0.0 | 0.0 | 0.0 | 0.0 | 0.0 | 0.0 | 0.0 | 0.0 | 0.0 |
| DEX0448_016.nt.1 | 22546.0 | 0.0 | 0.0 | 0.0 | 0.0 | 0.0 | 0.0 | 0.0 | 0.0 | 0.0 | 0.0 |
| DEX0448_016.nt.1 | 26543.0 | 2.8 | 2.8 | 0.0 | 0.0 | 3.7 | 3.7 | 0.0 | 0.0 | 3.8 | 3.8 |
| DEX0448_016.nt.2 | 22545.0 | 0.0 | 0.0 | 0.0 | 0.0 | 0.0 | 0.0 | 0.0 | 0.0 | 0.0 | 0.0 |
| DEX0448_016.nt.2 | 22546.0 | 0.0 | 0.0 | 0.0 | 0.0 | 0.0 | 0.0 | 0.0 | 0.0 | 0.0 | 0.0 |
| DEX0448_016.nt.2 | 26543.0 | 2.8 | 2.8 | 0.0 | 0.0 | 3.7 | 3.7 | 0.0 | 0.0 | 3.8 | 3.8 |
| DEX0448_016.nt.3 | 22545.0 | 0.0 | 0.0 | 0.0 | 0.0 | 0.0 | 0.0 | 0.0 | 0.0 | 0.0 | 0.0 |
| DEX0448_016.nt.3 | 22546.0 | 0.0 | 0.0 | 0.0 | 0.0 | 0.0 | 0.0 | 0.0 | 0.0 | 0.0 | 0.0 |
| DEX0448_016.nt.3 | 26543.0 | 2.8 | 2.8 | 0.0 | 0.0 | 3.7 | 3.7 | 0.0 | 0.0 | 3.8 | 3.8 |
| DEX0448_017.nt.1 | 29052.0 | 0.0 | 0.0 | 0.0 | 0.0 | 0.0 | 0.0 | 0.0 | 0.0 | 0.0 | 0.0 |
| DEX0448_018.nt.1 | 13245.0 | 11.1 | 11.1 | 22.2 | 22.2 | 7.4 | 7.4 | 10.0 | 10.0 | 11.5 | 11.5 |
| DEX0448_018.nt.1 | 13299.0 | 11.1 | 11.1 | 11.1 | 11.1 | 11.1 | 11.1 | 0.0 | 0.0 | 15.4 | 15.4 |
| DEX0448_018.nt.1 | 13320.0 | 5.6 | 5.6 | 11.1 | 11.1 | 3.7 | 3.7 | 0.0 | 0.0 | 7.7 | 7.7 |
| DEX0448_018.nt.1 | 13321.0 | 11.1 | 11.1 | 11.1 | 11.1 | 11.1 | 11.1 | 0.0 | 0.0 | 15.4 | 15.4 |
| DEX0448_018.nt.1 | 13323.0 | 13.9 | 13.9 | 11.1 | 11.1 | 14.8 | 14.8 | 0.0 | 0.0 | 19.2 | 19.2 |
| DEX0448_018.nt.1 | 13337.0 | 11.1 | 11.1 | 22.2 | 22.2 | 7.4 | 7.4 | 10.0 | 10.0 | 11.5 | 11.5 |
| DEX0448_018.nt.1 | 13338.0 | 5.6 | 5.7 | 11.1 | 11.1 | 3.7 | 3.8 | 0.0 | 0.0 | 7.7 | 8.0 |
| DEX0448_022.nt.1 | 32150.0 | 36.1 | 36.1 | 55.6 | 55.6 | 29.6 | 29.6 | 20.0 | 20.0 | 42.3 | 42.3 |
| DEX0448_022.nt.1 | 32151.0 | 22.2 | 22.2 | 44.4 | 44.4 | 14.8 | 14.8 | 10.0 | 10.0 | 26.9 | 26.9 |
| DEX0448_022.nt.2 | 32150.0 | 36.1 | 36.1 | 55.6 | 55.6 | 29.6 | 29.6 | 20.0 | 20.0 | 42.3 | 42.3 |
| DEX0448_022.nt.2 | 32151.0 | 22.2 | 22.2 | 44.4 | 44.4 | 14.8 | 14.8 | 10.0 | 10.0 | 26.9 | 26.9 |
| DEX0448_027.nt.1 | 15310.0 | 0.0 | 0.0 | 0.0 | 0.0 | 0.0 | 0.0 | 0.0 | 0.0 | 0.0 | 0.0 |
| DEX0448_027.nt.1 | 15311.0 | 0.0 | 0.0 | 0.0 | 0.0 | 0.0 | 0.0 | 0.0 | 0.0 | 0.0 | 0.0 |
| DEX0448_027.nt.1 | 15833.0 | 0.0 | 0.0 | 0.0 | 0.0 | 0.0 | 0.0 | 0.0 | 0.0 | 0.0 | 0.0 |
| DEX0448_027.nt.1 | 15834.0 | 0.0 | 0.0 | 0.0 | 0.0 | 0.0 | 0.0 | 0.0 | 0.0 | 0.0 | 0.0 |
| DEX0448_027.nt.1 | 15835.0 | 0.0 | 0.0 | 0.0 | 0.0 | 0.0 | 0.0 | 0.0 | 0.0 | 0.0 | 0.0 |
| DEX0448_027.nt.1 | 15836.0 | 0.0 | 0.0 | 0.0 | 0.0 | 0.0 | 0.0 | 0.0 | 0.0 | 0.0 | 0.0 |
| DEX0448_027.nt.1 | 15845.0 | 2.8 | 2.9 | 0.0 | 0.0 | 3.7 | 3.7 | 0.0 | 0.0 | 3.8 | 4.0 |
| DEX0448_027.nt.1 | 15846.0 | 2.8 | 2.8 | 0.0 | 0.0 | 3.7 | 3.7 | 0.0 | 0.0 | 3.8 | 3.8 |
| DEX0448_027.nt.1 | 32136.0 | 0.0 | 0.0 | 0.0 | 0.0 | 0.0 | 0.0 | 0.0 | 0.0 | 0.0 | 0.0 |
| DEX0448_027.nt.1 | 32137.0 | 2.8 | 2.8 | 0.0 | 0.0 | 3.7 | 3.7 | 0.0 | 0.0 | 3.8 | 3.8 |
| DEX0448_027.nt.2 | 15310.0 | 0.0 | 0.0 | 0.0 | 0.0 | 0.0 | 0.0 | 0.0 | 0.0 | 0.0 | 0.0 |
| DEX0448_027.nt.2 | 15311.0 | 0.0 | 0.0 | 0.0 | 0.0 | 0.0 | 0.0 | 0.0 | 0.0 | 0.0 | 0.0 |
| DEX0448_027.nt.2 | 15833.0 | 0.0 | 0.0 | 0.0 | 0.0 | 0.0 | 0.0 | 0.0 | 0.0 | 0.0 | 0.0 |
| DEX0448_027.nt.2 | 15834.0 | 0.0 | 0.0 | 0.0 | 0.0 | 0.0 | 0.0 | 0.0 | 0.0 | 0.0 | 0.0 |
| DEX0448_027.nt.2 | 15835.0 | 0.0 | 0.0 | 0.0 | 0.0 | 0.0 | 0.0 | 0.0 | 0.0 | 0.0 | 0.0 |
| DEX0448_027.nt.2 | 15836.0 | 0.0 | 0.0 | 0.0 | 0.0 | 0.0 | 0.0 | 0.0 | 0.0 | 0.0 | 0.0 |
| DEX0448_027.nt.2 | 15845.0 | 2.8 | 2.9 | 0.0 | 0.0 | 3.7 | 3.7 | 0.0 | 0.0 | 3.8 | 4.0 |
| DEX0448_027.nt.2 | 15846.0 | 2.8 | 2.8 | 0.0 | 0.0 | 3.7 | 3.7 | 0.0 | 0.0 | 3.8 | 3.8 |
| DEX0448_027.nt.2 | 32136.0 | 0.0 | 0.0 | 0.0 | 0.0 | 0.0 | 0.0 | 0.0 | 0.0 | 0.0 | 0.0 |
| DEX0448_027.nt.2 | 32137.0 | 2.8 | 2.8 | 0.0 | 0.0 | 3.7 | 3.7 | 0.0 | 0.0 | 3.8 | 3.8 |
| DEX0448_027.nt.3 | 15310.0 | 0.0 | 0.0 | 0.0 | 0.0 | 0.0 | 0.0 | 0.0 | 0.0 | 0.0 | 0.0 |
| DEX0448_027.nt.3 | 15311.0 | 0.0 | 0.0 | 0.0 | 0.0 | 0.0 | 0.0 | 0.0 | 0.0 | 0.0 | 0.0 |
| DEX0448_027.nt.3 | 15833.0 | 0.0 | 0.0 | 0.0 | 0.0 | 0.0 | 0.0 | 0.0 | 0.0 | 0.0 | 0.0 |
| DEX0448_027.nt.3 | 15834.0 | 0.0 | 0.0 | 0.0 | 0.0 | 0.0 | 0.0 | 0.0 | 0.0 | 0.0 | 0.0 |
| DEX0448_027.nt.3 | 15835.0 | 0.0 | 0.0 | 0.0 | 0.0 | 0.0 | 0.0 | 0.0 | 0.0 | 0.0 | 0.0 |
| DEX0448_027.nt.3 | 15836.0 | 0.0 | 0.0 | 0.0 | 0.0 | 0.0 | 0.0 | 0.0 | 0.0 | 0.0 | 0.0 |
| DEX0448_027.nt.3 | 15845.0 | 2.8 | 2.9 | 0.0 | 0.0 | 3.7 | 3.7 | 0.0 | 0.0 | 3.8 | 4.0 |
| DEX0448_027.nt.3 | 15846.0 | 2.8 | 2.8 | 0.0 | 0.0 | 3.7 | 3.7 | 0.0 | 0.0 | 3.8 | 3.8 |
| DEX0448_027.nt.3 | 32136.0 | 0.0 | 0.0 | 0.0 | 0.0 | 0.0 | 0.0 | 0.0 | 0.0 | 0.0 | 0.0 |
| DEX0448_027.nt.3 | 32137.0 | 2.8 | 2.8 | 0.0 | 0.0 | 3.7 | 3.7 | 0.0 | 0.0 | 3.8 | 3.8 |
| DEX0448_027.nt.4 | 15310.0 | 0.0 | 0.0 | 0.0 | 0.0 | 0.0 | 0.0 | 0.0 | 0.0 | 0.0 | 0.0 |
| DEX0448_027.nt.4 | 15311.0 | 0.0 | 0.0 | 0.0 | 0.0 | 0.0 | 0.0 | 0.0 | 0.0 | 0.0 | 0.0 |
| DEX0448_027.nt.4 | 15833.0 | 0.0 | 0.0 | 0.0 | 0.0 | 0.0 | 0.0 | 0.0 | 0.0 | 0.0 | 0.0 |
| DEX0448_027.nt.4 | 15834.0 | 0.0 | 0.0 | 0.0 | 0.0 | 0.0 | 0.0 | 0.0 | 0.0 | 0.0 | 0.0 |
| DEX0448_027.nt.4 | 15835.0 | 0.0 | 0.0 | 0.0 | 0.0 | 0.0 | 0.0 | 0.0 | 0.0 | 0.0 | 0.0 |
| DEX0448_027.nt.4 | 15836.0 | 0.0 | 0.0 | 0.0 | 0.0 | 0.0 | 0.0 | 0.0 | 0.0 | 0.0 | 0.0 |
| DEX0448_027.nt.4 | 32136.0 | 0.0 | 0.0 | 0.0 | 0.0 | 0.0 | 0.0 | 0.0 | 0.0 | 0.0 | 0.0 |
| DEX0448_027.nt.4 | 32137.0 | 2.8 | 2.8 | 0.0 | 0.0 | 3.7 | 3.7 | 0.0 | 0.0 | 3.8 | 3.8 |
| DEX0448_027.nt.5 | 15310.0 | 0.0 | 0.0 | 0.0 | 0.0 | 0.0 | 0.0 | 0.0 | 0.0 | 0.0 | 0.0 |
| DEX0448_027.nt.5 | 15311.0 | 0.0 | 0.0 | 0.0 | 0.0 | 0.0 | 0.0 | 0.0 | 0.0 | 0.0 | 0.0 |
| DEX0448_027.nt.5 | 15833.0 | 0.0 | 0.0 | 0.0 | 0.0 | 0.0 | 0.0 | 0.0 | 0.0 | 0.0 | 0.0 |
| DEX0448_027.nt.5 | 15834.0 | 0.0 | 0.0 | 0.0 | 0.0 | 0.0 | 0.0 | 0.0 | 0.0 | 0.0 | 0.0 |
| DEX0448_027.nt.5 | 15835.0 | 0.0 | 0.0 | 0.0 | 0.0 | 0.0 | 0.0 | 0.0 | 0.0 | 0.0 | 0.0 |
| DEX0448_027.nt.5 | 15836.0 | 0.0 | 0.0 | 0.0 | 0.0 | 0.0 | 0.0 | 0.0 | 0.0 | 0.0 | 0.0 |
| DEX0448_027.nt.5 | 32136.0 | 0.0 | 0.0 | 0.0 | 0.0 | 0.0 | 0.0 | 0.0 | 0.0 | 0.0 | 0.0 |
| DEX0448_027.nt.5 | 32137.0 | 2.8 | 2.8 | 0.0 | 0.0 | 3.7 | 3.7 | 0.0 | 0.0 | 3.8 | 3.8 |
| DEX0448_027.nt.6 | 15310.0 | 0.0 | 0.0 | 0.0 | 0.0 | 0.0 | 0.0 | 0.0 | 0.0 | 0.0 | 0.0 |
| DEX0448_027.nt.6 | 15311.0 | 0.0 | 0.0 | 0.0 | 0.0 | 0.0 | 0.0 | 0.0 | 0.0 | 0.0 | 0.0 |
| DEX0448_027.nt.6 | 15835.0 | 0.0 | 0.0 | 0.0 | 0.0 | 0.0 | 0.0 | 0.0 | 0.0 | 0.0 | 0.0 |
| DEX0448_027.nt.6 | 15836.0 | 0.0 | 0.0 | 0.0 | 0.0 | 0.0 | 0.0 | 0.0 | 0.0 | 0.0 | 0.0 |
| DEX0448_027.nt.6 | 15845.0 | 2.8 | 2.9 | 0.0 | 0.0 | 3.7 | 3.7 | 0.0 | 0.0 | 3.8 | 4.0 |
| DEX0448_027.nt.6 | 15846.0 | 2.8 | 2.8 | 0.0 | 0.0 | 3.7 | 3.7 | 0.0 | 0.0 | 3.8 | 3.8 |
| DEX0448_027.nt.6 | 32136.0 | 0.0 | 0.0 | 0.0 | 0.0 | 0.0 | 0.0 | 0.0 | 0.0 | 0.0 | 0.0 |
| DEX0448_027.nt.6 | 32137.0 | 2.8 | 2.8 | 0.0 | 0.0 | 3.7 | 3.7 | 0.0 | 0.0 | 3.8 | 3.8 |
| DEX0448_033.nt.1 | 22294.0 | 2.8 | 2.8 | 11.1 | 11.1 | 0.0 | 0.0 | 10.0 | 10.0 | 0.0 | 0.0 |
| DEX0448_034.nt.1 | 22545.0 | 0.0 | 0.0 | 0.0 | 0.0 | 0.0 | 0.0 | 0.0 | 0.0 | 0.0 | 0.0 |
| DEX0448_034.nt.1 | 22546.0 | 0.0 | 0.0 | 0.0 | 0.0 | 0.0 | 0.0 | 0.0 | 0.0 | 0.0 | 0.0 |
| DEX0448_035.nt.1 | 40309.0 | 0.0 | 0.0 | 0.0 | 0.0 | 0.0 | 0.0 | 0.0 | 0.0 | 0.0 | 0.0 |
| DEX0448_043.nt.1 | 22586.0 | 8.3 | 8.3 | 0.0 | 0.0 | 11.1 | 11.1 | 0.0 | 0.0 | 11.5 | 11.5 |
| DEX0448_043.nt.2 | 22585.0 | 8.3 | 8.3 | 0.0 | 0.0 | 11.1 | 11.1 | 0.0 | 0.0 | 11.5 | 11.5 |
| DEX0448_043.nt.2 | 22586.0 | 8.3 | 8.3 | 0.0 | 0.0 | 11.1 | 11.1 | 0.0 | 0.0 | 11.5 | 11.5 |

[0477] TABLE 5

| | | | | | Mam | | | | |
|---|---|---|---|---|---|---|---|---|---|
| | | | | Mam | NOT | | | | Mam |
| | | Mam | | NOT | HER2 | Mam | Mam ER | Mam | NOT ER |
| | | HER2 | Mam | HER2 | up % | ER | up % | NOT | up % |
| | | up | HER2 up | up | valid | up | valid | ER up | valid |
| | Oligo | % up | % valid | % up | up | % up | up | % up | up |
| DEX ID | Name | n = 10 | up n = 10 | n = 26 | n = 26 | n = 20 | n = 20 | n = 16 | n = 16 |
| DEX0448_010.nt.1 | 17869.0 | 0.0 | 0.0 | 11.5 | 11.5 | 0.0 | 0.0 | 18.8 | 18.8 |
| DEX0448_010.nt.1 | 31466.0 | 0.0 | 0.0 | 11.5 | 11.5 | 0.0 | 0.0 | 18.8 | 18.8 |
| DEX0448_011.nt.1 | 20711.0 | 20.0 | 20.0 | 15.4 | 15.4 | 25.0 | 25.0 | 6.2 | 6.2 |
| DEX0448_016.nt.1 | 22545.0 | 0.0 | 0.0 | 0.0 | 0.0 | 0.0 | 0.0 | 0.0 | 0.0 |
| DEX0448_016.nt.1 | 22546.0 | 0.0 | 0.0 | 0.0 | 0.0 | 0.0 | 0.0 | 0.0 | 0.0 |
| DEX0448_016.nt.1 | 26543.0 | 0.0 | 0.0 | 3.8 | 3.8 | 0.0 | 0.0 | 6.2 | 6.2 |
| DEX0448_016.nt.2 | 22545.0 | 0.0 | 0.0 | 0.0 | 0.0 | 0.0 | 0.0 | 0.0 | 0.0 |
| DEX0448_016.nt.2 | 22546.0 | 0.0 | 0.0 | 0.0 | 0.0 | 0.0 | 0.0 | 0.0 | 0.0 |
| DEX0448_016.nt.2 | 26543.0 | 0.0 | 0.0 | 3.8 | 3.8 | 0.0 | 0.0 | 6.2 | 6.2 |
| DEX0448_016.nt.3 | 22545.0 | 0.0 | 0.0 | 0.0 | 0.0 | 0.0 | 0.0 | 0.0 | 0.0 |
| DEX0448_016.nt.3 | 22546.0 | 0.0 | 0.0 | 0.0 | 0.0 | 0.0 | 0.0 | 0.0 | 0.0 |
| DEX0448_016.nt.3 | 26543.0 | 0.0 | 0.0 | 3.8 | 3.8 | 0.0 | 0.0 | 6.2 | 6.2 |
| DEX0448_017.nt.1 | 29052.0 | 0.0 | 0.0 | 0.0 | 0.0 | 0.0 | 0.0 | 0.0 | 0.0 |
| DEX0448_018.nt.1 | 13245.0 | 0.0 | 0.0 | 15.4 | 15.4 | 10.0 | 10.0 | 12.5 | 12.5 |
| DEX0448_018.nt.1 | 13299.0 | 0.0 | 0.0 | 15.4 | 15.4 | 5.0 | 5.0 | 18.8 | 18.8 |
| DEX0448_018.nt.1 | 13320.0 | 0.0 | 0.0 | 7.7 | 7.7 | 0.0 | 0.0 | 12.5 | 12.5 |
| DEX0448_018.nt.1 | 13321.0 | 0.0 | 0.0 | 15.4 | 15.4 | 5.0 | 5.0 | 18.8 | 18.8 |
| DEX0448_018.nt.1 | 13323.0 | 10.0 | 10.0 | 15.4 | 15.4 | 5.0 | 5.0 | 25.0 | 25.0 |
| DEX0448_018.nt.1 | 13337.0 | 0.0 | 0.0 | 15.4 | 15.4 | 5.0 | 5.0 | 18.8 | 18.8 |
| DEX0448_018.nt.1 | 13338.0 | 0.0 | 0.0 | 7.7 | 8.0 | 0.0 | 0.0 | 12.5 | 12.5 |
| DEX0448_022.nt.1 | 32150.0 | 40.0 | 40.0 | 34.6 | 34.6 | 25.0 | 25.0 | 50.0 | 50.0 |
| DEX0448_022.nt.1 | 32151.0 | 20.0 | 20.0 | 23.1 | 23.1 | 10.0 | 10.0 | 37.5 | 37.5 |
| DEX0448_022.nt.2 | 32150.0 | 40.0 | 40.0 | 34.6 | 34.6 | 25.0 | 25.0 | 50.0 | 50.0 |
| DEX0448_022.nt.2 | 32151.0 | 20.0 | 20.0 | 23.1 | 23.1 | 10.0 | 10.0 | 37.5 | 37.5 |
| DEX0448_027.nt.1 | 15310.0 | 0.0 | 0.0 | 0.0 | 0.0 | 0.0 | 0.0 | 0.0 | 0.0 |
| DEX0448_027.nt.1 | 15311.0 | 0.0 | 0.0 | 0.0 | 0.0 | 0.0 | 0.0 | 0.0 | 0.0 |
| DEX0448_027.nt.1 | 15833.0 | 0.0 | 0.0 | 0.0 | 0.0 | 0.0 | 0.0 | 0.0 | 0.0 |
| DEX0448_027.nt.1 | 15834.0 | 0.0 | 0.0 | 0.0 | 0.0 | 0.0 | 0.0 | 0.0 | 0.0 |
| DEX0448_027.nt.1 | 15835.0 | 0.0 | 0.0 | 0.0 | 0.0 | 0.0 | 0.0 | 0.0 | 0.0 |
| DEX0448_027.nt.1 | 15836.0 | 0.0 | 0.0 | 0.0 | 0.0 | 0.0 | 0.0 | 0.0 | 0.0 |
| DEX0448_027.nt.1 | 15845.0 | 10.0 | 10.0 | 0.0 | 0.0 | 0.0 | 0.0 | 6.2 | 6.2 |
| DEX0448_027.nt.1 | 15846.0 | 10.0 | 10.0 | 0.0 | 0.0 | 0.0 | 0.0 | 6.2 | 6.2 |
| DEX0448_027.nt.1 | 32136.0 | 0.0 | 0.0 | 0.0 | 0.0 | 0.0 | 0.0 | 0.0 | 0.0 |
| DEX0448_027.nt.1 | 32137.0 | 10.0 | 10.0 | 0.0 | 0.0 | 0.0 | 0.0 | 6.2 | 6.2 |
| DEX0448_027.nt.2 | 15310.0 | 0.0 | 0.0 | 0.0 | 0.0 | 0.0 | 0.0 | 0.0 | 0.0 |
| DEX0448_027.nt.2 | 15311.0 | 0.0 | 0.0 | 0.0 | 0.0 | 0.0 | 0.0 | 0.0 | 0.0 |
| DEX0448_027.nt.2 | 15833.0 | 0.0 | 0.0 | 0.0 | 0.0 | 0.0 | 0.0 | 0.0 | 0.0 |
| DEX0448_027.nt.2 | 15834.0 | 0.0 | 0.0 | 0.0 | 0.0 | 0.0 | 0.0 | 0.0 | 0.0 |
| DEX0448_027.nt.2 | 15835.0 | 0.0 | 0.0 | 0.0 | 0.0 | 0.0 | 0.0 | 0.0 | 0.0 |
| DEX0448_027.nt.2 | 15836.0 | 0.0 | 0.0 | 0.0 | 0.0 | 0.0 | 0.0 | 0.0 | 0.0 |
| DEX0448_027.nt.2 | 15845.0 | 10.0 | 10.0 | 0.0 | 0.0 | 0.0 | 0.0 | 6.2 | 6.2 |
| DEX0448_027.nt.2 | 15846.0 | 10.0 | 10.0 | 0.0 | 0.0 | 0.0 | 0.0 | 6.2 | 6.2 |
| DEX0448_027.nt.2 | 32136.0 | 0.0 | 0.0 | 0.0 | 0.0 | 0.0 | 0.0 | 0.0 | 0.0 |
| DEX0448_027.nt.2 | 32137.0 | 10.0 | 10.0 | 0.0 | 0.0 | 0.0 | 0.0 | 6.2 | 6.2 |
| DEX0448_027.nt.3 | 15310.0 | 0.0 | 0.0 | 0.0 | 0.0 | 0.0 | 0.0 | 0.0 | 0.0 |
| DEX0448_027.nt.3 | 15311.0 | 0.0 | 0.0 | 0.0 | 0.0 | 0.0 | 0.0 | 0.0 | 0.0 |
| DEX0448_027.nt.3 | 15833.0 | 0.0 | 0.0 | 0.0 | 0.0 | 0.0 | 0.0 | 0.0 | 0.0 |
| DEX0448_027.nt.3 | 15834.0 | 0.0 | 0.0 | 0.0 | 0.0 | 0.0 | 0.0 | 0.0 | 0.0 |
| DEX0448_027.nt.3 | 15835.0 | 0.0 | 0.0 | 0.0 | 0.0 | 0.0 | 0.0 | 0.0 | 0.0 |
| DEX0448_027.nt.3 | 15836.0 | 0.0 | 0.0 | 0.0 | 0.0 | 0.0 | 0.0 | 0.0 | 0.0 |
| DEX0448_027.nt.3 | 15845.0 | 10.0 | 10.0 | 0.0 | 0.0 | 0.0 | 0.0 | 6.2 | 6.2 |
| DEX0448_027.nt.3 | 15846.0 | 10.0 | 10.0 | 0.0 | 0.0 | 0.0 | 0.0 | 6.2 | 6.2 |
| DEX0448_027.nt.3 | 32136.0 | 0.0 | 0.0 | 0.0 | 0.0 | 0.0 | 0.0 | 0.0 | 0.0 |
| DEX0448_027.nt.3 | 32137.0 | 10.0 | 10.0 | 0.0 | 0.0 | 0.0 | 0.0 | 6.2 | 6.2 |
| DEX0448_027.nt.4 | 15310.0 | 0.0 | 0.0 | 0.0 | 0.0 | 0.0 | 0.0 | 0.0 | 0.0 |
| DEX0448_027.nt.4 | 15311.0 | 0.0 | 0.0 | 0.0 | 0.0 | 0.0 | 0.0 | 0.0 | 0.0 |
| DEX0448_027.nt.4 | 15833.0 | 0.0 | 0.0 | 0.0 | 0.0 | 0.0 | 0.0 | 0.0 | 0.0 |
| DEX0448_027.nt.4 | 15834.0 | 0.0 | 0.0 | 0.0 | 0.0 | 0.0 | 0.0 | 0.0 | 0.0 |
| DEX0448_027.nt.4 | 15835.0 | 0.0 | 0.0 | 0.0 | 0.0 | 0.0 | 0.0 | 0.0 | 0.0 |
| DEX0448_027.nt.4 | 15836.0 | 0.0 | 0.0 | 0.0 | 0.0 | 0.0 | 0.0 | 0.0 | 0.0 |
| DEX0448_027.nt.4 | 32136.0 | 0.0 | 0.0 | 0.0 | 0.0 | 0.0 | 0.0 | 0.0 | 0.0 |
| DEX0448_027.nt.4 | 32137.0 | 10.0 | 10.0 | 0.0 | 0.0 | 0.0 | 0.0 | 6.2 | 6.2 |
| DEX0448_027.nt.5 | 15310.0 | 0.0 | 0.0 | 0.0 | 0.0 | 0.0 | 0.0 | 0.0 | 0.0 |
| DEX0448_027.nt.5 | 15311.0 | 0.0 | 0.0 | 0.0 | 0.0 | 0.0 | 0.0 | 0.0 | 0.0 |
| DEX0448_027.nt.5 | 15833.0 | 0.0 | 0.0 | 0.0 | 0.0 | 0.0 | 0.0 | 0.0 | 0.0 |
| DEX0448_027.nt.5 | 15834.0 | 0.0 | 0.0 | 0.0 | 0.0 | 0.0 | 0.0 | 0.0 | 0.0 |
| DEX0448_027.nt.5 | 15835.0 | 0.0 | 0.0 | 0.0 | 0.0 | 0.0 | 0.0 | 0.0 | 0.0 |
| DEX0448_027.nt.5 | 15836.0 | 0.0 | 0.0 | 0.0 | 0.0 | 0.0 | 0.0 | 0.0 | 0.0 |
| DEX0448_027.nt.5 | 32136.0 | 0.0 | 0.0 | 0.0 | 0.0 | 0.0 | 0.0 | 0.0 | 0.0 |
| DEX0448_027.nt.5 | 32137.0 | 10.0 | 10.0 | 0.0 | 0.0 | 0.0 | 0.0 | 6.2 | 6.2 |
| DEX0448_027.nt.6 | 15310.0 | 0.0 | 0.0 | 0.0 | 0.0 | 0.0 | 0.0 | 0.0 | 0.0 |
| DEX0448_027.nt.6 | 15311.0 | 0.0 | 0.0 | 0.0 | 0.0 | 0.0 | 0.0 | 0.0 | 0.0 |
| DEX0448_027.nt.6 | 15835.0 | 0.0 | 0.0 | 0.0 | 0.0 | 0.0 | 0.0 | 0.0 | 0.0 |
| DEX0448_027.nt.6 | 15836.0 | 0.0 | 0.0 | 0.0 | 0.0 | 0.0 | 0.0 | 0.0 | 0.0 |
| DEX0448_027.nt.6 | 15845.0 | 10.0 | 10.0 | 0.0 | 0.0 | 0.0 | 0.0 | 6.2 | 6.2 |
| DEX0448_027.nt.6 | 15846.0 | 10.0 | 10.0 | 0.0 | 0.0 | 0.0 | 0.0 | 6.2 | 6.2 |
| DEX0448_027.nt.6 | 32136.0 | 0.0 | 0.0 | 0.0 | 0.0 | 0.0 | 0.0 | 0.0 | 0.0 |
| DEX0448_027.nt.6 | 32137.0 | 10.0 | 10.0 | 0.0 | 0.0 | 0.0 | 0.0 | 6.2 | 6.2 |
| DEX0448_033.nt.1 | 22294.0 | 0.0 | 0.0 | 3.8 | 3.8 | 5.0 | 5.0 | 0.0 | 0.0 |
| DEX0448_034.nt.1 | 22545.0 | 0.0 | 0.0 | 0.0 | 0.0 | 0.0 | 0.0 | 0.0 | 0.0 |
| DEX0448_034.nt.1 | 22546.0 | 0.0 | 0.0 | 0.0 | 0.0 | 0.0 | 0.0 | 0.0 | 0.0 |
| DEX0448_035.nt.1 | 40309.0 | 0.0 | 0.0 | 0.0 | 0.0 | 0.0 | 0.0 | 0.0 | 0.0 |
| DEX0448_043.nt.1 | 22586.0 | 0.0 | 0.0 | 11.5 | 11.5 | 5.0 | 5.0 | 12.5 | 12.5 |
| DEX0448_043.nt.2 | 22585.0 | 0.0 | 0.0 | 11.5 | 11.5 | 5.0 | 5.0 | 12.5 | 12.5 |
| DEX0448_043.nt.2 | 22586.0 | 0.0 | 0.0 | 11.5 | 11.5 | 5.0 | 5.0 | 12.5 | 12.5 |

[0478] TABLE 6

| | | | Mam | | Mam | Mam | Mam |
|---|---|---|---|---|---|---|---|
| | | Mam | Multi- | Mam | Multi- | Multi- | Multi- |
| | | Multi- | Cancer | Multi- | Cancer | Cancer | Cancer |
| | | Cancer | ALL | Cancer | ST1 | ST2, 3 | ST2, 3 |
| | Oligo | ALL % up | % valid | ST1 % up | % valid | % up | % valid |
| DEX ID | Name | n = 20 | up n = 20 | n = 9 | up n = 9 | n = 11 | up n = 11 |
| DEX0448_016.nt.1 | 5354.0 | 0.0 | 0.0 | 0.0 | 0.0 | 0.0 | 0.0 |
| DEX0448_019.nt.1 | 1045.0 | 0.0 | 0.0 | 0.0 | 0.0 | 0.0 | 0.0 |
| DEX0448_026.nt.1 | 78479.0 | 0.0 | 0.0 | 0.0 | 0.0 | 0.0 | 0.0 |
| DEX0448_026.nt.1 | 78479.1 | 0.0 | 0.0 | 0.0 | 0.0 | 0.0 | 0.0 |
| DEX0448_026.nt.2 | 78479.0 | 0.0 | 0.0 | 0.0 | 0.0 | 0.0 | 0.0 |
| DEX0448_026.nt.2 | 78479.1 | 0.0 | 0.0 | 0.0 | 0.0 | 0.0 | 0.0 |
| DEX0448_028.nt.1 | 5305.0 | 0.0 | 0.0 | 0.0 | 0.0 | 0.0 | 0.0 |
| DEX0448_028.nt.1 | 5306.0 | 0.0 | 0.0 | 0.0 | 0.0 | 0.0 | 0.0 |
| DEX0448_028.nt.2 | 5305.0 | 0.0 | 0.0 | 0.0 | 0.0 | 0.0 | 0.0 |
| DEX0448_028.nt.2 | 5306.0 | 0.0 | 0.0 | 0.0 | 0.0 | 0.0 | 0.0 |
| DEX0448_034.nt.1 | 5354.0 | 0.0 | 0.0 | 0.0 | 0.0 | 0.0 | 0.0 |
| DEX0448_044.nt.1 | 42013.0 | 0.0 | 0.0 | 0.0 | 0.0 | 0.0 | 0.0 |
| DEX0448_044.nt.1 | 42013.1 | 0.0 | 0.0 | 0.0 | 0.0 | 0.0 | 0.0 |
| DEX0448_044.nt.1 | 42013.2 | 0.0 | 0.0 | 0.0 | 0.0 | 0.0 | 0.0 |

[0479] Lung Cancer Chips

[0480] For lung cancer two different chip designs were evaluated with overlapping sets of a total of 29 samples, comparing the expression patterns of lung cancer derived polyA+RNA to polyA+RNA isolated from a pool of 12 normal lung tissues. For the Lung Array Chip all 29 samples (15 squamous cell carcinomas and 14 adenocarcinomas including 14 stage I and 15 stage II/III cancers) were analyzed and for the Multi-Cancer Array Chip a subset of 22 of these samples (10 squamous cell carcinomas, 12 adenocarcinomas) were assessed.

[0481] The results for the statistically significant up-regulated genes on the Lung Array Chip are shown in Table 7. The results for the statistically significant up-regulated genes on the Multi-Cancer Array Chip are shown in Table 8. The first two columns of each table contain information about the sequence itself (DEX ID, Oligo Name), the next columns show the results obtained for all (“ALL”) lung cancer samples, squamous cell carcinomas (“SQ”), adenocarcinomas (“AD”), or cancers corresponding to stage I (“ST1”), or stages II and III (“ST2,3”). ‘% up’ indicates the percentage of all experiments in which up-regulation of at least 2-fold was observed (n=729 for Lung Array Chip, n=22 for Multi-Cancer Array Chip), ‘% valid up’ indicates the percentage of experiments with valid expression values in which up-regulation of at least 2-fold was observed.

TABLE 7

| | | | Lng | | Lng | | Lng | | Lng | | Lng |
|---|---|---|---|---|---|---|---|---|---|---|---|
| | | Lng | ALL % | Lng | SQ % | Lng | AD % | Lng | ST1 % | Lng | ST2, 3 % |
| | | ALL | valid | SQ | valid | AD | valid | ST1 | valid | ST2, 3 | valid |
| | Oligo | % up | up | % up | up | % up | up | % up | up | % up | up |
| DEX ID | Name | n = 29 | n = 29 | n = 15 | n = 15 | n = 14 | n = 14 | n = 14 | n = 14 | n = 15 | n = 15 |
| DEX0448_010.nt.1 | 835.0 | 0.0 | 0.0 | 0.0 | 0.0 | 0.0 | 0.0 | 0.0 | 0.0 | 0.0 | 0.0 |
| DEX0448_010.nt.1 | 836.0 | 0.0 | 0.0 | 0.0 | 0.0 | 0.0 | 0.0 | 0.0 | 0.0 | 0.0 | 0.0 |
| DEX0448_010.nt.1 | 953.0 | 0.0 | 0.0 | 0.0 | 0.0 | 0.0 | 0.0 | 0.0 | 0.0 | 0.0 | 0.0 |
| DEX0448_010.nt.1 | 955.0 | 0.0 | 0.0 | 0.0 | 0.0 | 0.0 | 0.0 | 0.0 | 0.0 | 0.0 | 0.0 |
| DEX0448_010.nt.1 | 5749.0 | 0.0 | 0.0 | 0.0 | 0.0 | 0.0 | 0.0 | 0.0 | 0.0 | 0.0 | 0.0 |
| DEX0448_016.nt.1 | 5353.0 | 13.8 | 13.8 | 20.0 | 20.0 | 7.1 | 7.1 | 14.3 | 14.3 | 13.3 | 13.3 |
| DEX0448_019.nt.1 | 1044.0 | 13.8 | 13.8 | 13.3 | 13.3 | 14.3 | 14.3 | 14.3 | 14.3 | 13.3 | 13.3 |
| DEX0448_022.nt.1 | 791.0 | 0.0 | 0.0 | 0.0 | 0.0 | 0.0 | 0.0 | 0.0 | 0.0 | 0.0 | 0.0 |
| DEX0448_022.nt.1 | 792.0 | 0.0 | 0.0 | 0.0 | 0.0 | 0.0 | 0.0 | 0.0 | 0.0 | 0.0 | 0.0 |
| DEX0448_022.nt.1 | 803.0 | 0.0 | 0.0 | 0.0 | 0.0 | 0.0 | 0.0 | 0.0 | 0.0 | 0.0 | 0.0 |
| DEX0448_022.nt.1 | 804.0 | 0.0 | 0.0 | 0.0 | 0.0 | 0.0 | 0.0 | 0.0 | 0.0 | 0.0 | 0.0 |
| DEX0448_022.nt.1 | 855.0 | 0.0 | 0.0 | 0.0 | 0.0 | 0.0 | 0.0 | 0.0 | 0.0 | 0.0 | 0.0 |
| DEX0448_022.nt.2 | 791.0 | 0.0 | 0.0 | 0.0 | 0.0 | 0.0 | 0.0 | 0.0 | 0.0 | 0.0 | 0.0 |
| DEX0448_022.nt.2 | 792.0 | 0.0 | 0.0 | 0.0 | 0.0 | 0.0 | 0.0 | 0.0 | 0.0 | 0.0 | 0.0 |
| DEX0448_022.nt.2 | 803.0 | 0.0 | 0.0 | 0.0 | 0.0 | 0.0 | 0.0 | 0.0 | 0.0 | 0.0 | 0.0 |
| DEX0448_022.nt.2 | 804.0 | 0.0 | 0.0 | 0.0 | 0.0 | 0.0 | 0.0 | 0.0 | 0.0 | 0.0 | 0.0 |
| DEX0448_022.nt.2 | 855.0 | 0.0 | 0.0 | 0.0 | 0.0 | 0.0 | 0.0 | 0.0 | 0.0 | 0.0 | 0.0 |
| DEX0448_028.nt.1 | 1262.0 | 0.0 | 0.0 | 0.0 | 0.0 | 0.0 | 0.0 | 0.0 | 0.0 | 0.0 | 0.0 |
| DEX0448_028.nt.1 | 1263.0 | 0.0 | 0.0 | 0.0 | 0.0 | 0.0 | 0.0 | 0.0 | 0.0 | 0.0 | 0.0 |
| DEX0448_028.nt.1 | 1264.0 | 0.0 | 0.0 | 0.0 | 0.0 | 0.0 | 0.0 | 0.0 | 0.0 | 0.0 | 0.0 |
| DEX0448_028.nt.1 | 1265.0 | 0.0 | 0.0 | 0.0 | 0.0 | 0.0 | 0.0 | 0.0 | 0.0 | 0.0 | 0.0 |
| DEX0448_028.nt.1 | 1320.0 | 0.0 | 0.0 | 0.0 | 0.0 | 0.0 | 0.0 | 0.0 | 0.0 | 0.0 | 0.0 |
| DEX0448_028.nt.2 | 1262.0 | 0.0 | 0.0 | 0.0 | 0.0 | 0.0 | 0.0 | 0.0 | 0.0 | 0.0 | 0.0 |
| DEX0448_028.nt.2 | 1263.0 | 0.0 | 0.0 | 0.0 | 0.0 | 0.0 | 0.0 | 0.0 | 0.0 | 0.0 | 0.0 |
| DEX0448_028.nt.2 | 1264.0 | 0.0 | 0.0 | 0.0 | 0.0 | 0.0 | 0.0 | 0.0 | 0.0 | 0.0 | 0.0 |
| DEX0448_028.nt.2 | 1265.0 | 0.0 | 0.0 | 0.0 | 0.0 | 0.0 | 0.0 | 0.0 | 0.0 | 0.0 | 0.0 |
| DEX0448_028.nt.2 | 1320.0 | 0.0 | 0.0 | 0.0 | 0.0 | 0.0 | 0.0 | 0.0 | 0.0 | 0.0 | 0.0 |
| DEX0448_034.nt.1 | 5353.0 | 13.8 | 13.8 | 20.0 | 20.0 | 7.1 | 7.1 | 14.3 | 14.3 | 13.3 | 13.3 |
| DEX0448_035.nt.1 | 3729.0 | 0.0 | 0.0 | 0.0 | 0.0 | 0.0 | 0.0 | 0.0 | 0.0 | 0.0 | 0.0 |
| DEX0448_040.nt.2 | 7434.0 | 10.3 | 11.5 | 6.7 | 7.1 | 14.3 | 16.7 | 14.3 | 16.7 | 6.7 | 7.1 |
| DEX0448_040.nt.2 | 7435.0 | 10.3 | 12.5 | 6.7 | 8.3 | 14.3 | 16.7 | 14.3 | 15.4 | 6.7 | 9.1 |
| DEX0448_040.nt.3 | 7434.0 | 10.3 | 11.5 | 6.7 | 7.1 | 14.3 | 16.7 | 14.3 | 16.7 | 6.7 | 7.1 |
| DEX0448_040.nt.3 | 7435.0 | 10.3 | 12.5 | 6.7 | 8.3 | 14.3 | 16.7 | 14.3 | 15.4 | 6.7 | 9.1 |
| DEX0448_040.nt.4 | 7434.0 | 10.3 | 11.5 | 6.7 | 7.1 | 14.3 | 16.7 | 14.3 | 16.7 | 6.7 | 7.1 |
| DEX0448_040.nt.4 | 7435.0 | 10.3 | 12.5 | 6.7 | 8.3 | 14.3 | 16.7 | 14.3 | 15.4 | 6.7 | 9.1 |
| DEX0448_040.nt.5 | 7434.0 | 10.3 | 11.5 | 6.7 | 7.1 | 14.3 | 16.7 | 14.3 | 16.7 | 6.7 | 7.1 |
| DEX0448_040.nt.5 | 7435.0 | 10.3 | 12.5 | 6.7 | 8.3 | 14.3 | 16.7 | 14.3 | 15.4 | 6.7 | 9.1 |
| DEX0448_040.nt.6 | 7434.0 | 10.3 | 11.5 | 6.7 | 7.1 | 14.3 | 16.7 | 14.3 | 16.7 | 6.7 | 7.1 |
| DEX0448_040.nt.6 | 7435.0 | 10.3 | 12.5 | 6.7 | 8.3 | 14.3 | 16.7 | 14.3 | 15.4 | 6.7 | 9.1 |
| DEX0448_042.nt.1 | 7412.0 | 13.8 | 13.8 | 20.0 | 20.0 | 7.1 | 7.1 | 14.3 | 14.3 | 13.3 | 13.3 |
| DEX0448_042.nt.1 | 7413.0 | 17.2 | 17.2 | 20.0 | 20.0 | 14.3 | 14.3 | 21.4 | 21.4 | 13.3 | 13.3 |
| DEX0448_043.nt.2 | 939.0 | 3.4 | 4.0 | 0.0 | 0.0 | 7.1 | 7.7 | 0.0 | 0.0 | 6.7 | 6.7 |
| DEX0448_043.nt.2 | 940.0 | 3.4 | 3.4 | 0.0 | 0.0 | 7.1 | 7.1 | 0.0 | 0.0 | 6.7 | 6.7 |
| DEX0448_043.nt.2 | 943.0 | 3.4 | 3.4 | 0.0 | 0.0 | 7.1 | 7.1 | 0.0 | 0.0 | 6.7 | 6.7 |
| DEX0448_043.nt.2 | 944.0 | 3.4 | 3.4 | 0.0 | 0.0 | 7.1 | 7.1 | 0.0 | 0.0 | 6.7 | 6.7 |
| DEX0448_043.nt.2 | 946.0 | 3.4 | 3.4 | 0.0 | 0.0 | 7.1 | 7.1 | 0.0 | 0.0 | 6.7 | 6.7 |
| DEX0448_043.nt.2 | 960.0 | 0.0 | 0.0 | 0.0 | 0.0 | 0.0 | 0.0 | 0.0 | 0.0 | 0.0 | 0.0 |
| DEX0448_043.nt.2 | 966.0 | 3.4 | 3.4 | 0.0 | 0.0 | 7.1 | 7.1 | 0.0 | 0.0 | 6.7 | 6.7 |
| DEX0448_044.nt.1 | 42013.0 | 0.0 | 0.0 | 0.0 | 0.0 | 0.0 | 0.0 | 0.0 | 0.0 | 0.0 | 0.0 |

[0482] TABLE 8

| | | | Lng | | Lng | | Lng |
|---|---|---|---|---|---|---|---|
| | | Lng | Multi- | Lng | Multi- | Lng | Multi- |
| | | Multi- | Cancer | Multi- | Cancer | Multi- | Cancer |
| | | Cancer | ALL | Cancer | SQ | Cancer | AD |
| | Oligo | ALL % up | % valid | SQ % up | % valid | AD % up | % valid |
| DEX ID | Name | n = 22 | up n = 22 | n = 10 | up n = 10 | n = 12 | up n = 12 |
| DEX0448_016.nt.1 | 5354.0 | 0.0 | 0.0 | 0.0 | 0.0 | 0.0 | 0.0 |
| DEX0448_019.nt.1 | 1045.0 | 4.5 | 4.5 | 0.0 | 0.0 | 8.3 | 8.3 |
| DEX0448_026.nt.1 | 78479.0 | 31.8 | 36.8 | 10.0 | 12.5 | 50.0 | 54.5 |
| DEX0448_026.nt.1 | 78479.1 | 36.4 | 36.4 | 10.0 | 10.0 | 58.3 | 58.3 |
| DEX0448_026.nt.2 | 78479.0 | 31.8 | 36.8 | 10.0 | 12.5 | 50.0 | 54.5 |
| DEX0448_026.nt.2 | 78479.1 | 36.4 | 36.4 | 10.0 | 10.0 | 58.3 | 58.3 |
| DEX0448_028.nt.1 | 5305.0 | 0.0 | 0.0 | 0.0 | 0.0 | 0.0 | 0.0 |
| DEX0448_028.nt.1 | 5306.0 | 0.0 | 0.0 | 0.0 | 0.0 | 0.0 | 0.0 |
| DEX0448_028.nt.2 | 5305.0 | 0.0 | 0.0 | 0.0 | 0.0 | 0.0 | 0.0 |
| DEX0448_028.nt.2 | 5306.0 | 0.0 | 0.0 | 0.0 | 0.0 | 0.0 | 0.0 |
| DEX0448_034.nt.1 | 5354.0 | 0.0 | 0.0 | 0.0 | 0.0 | 0.0 | 0.0 |
| DEX0448_044.nt.1 | 42013.0 | 0.0 | 0.0 | 0.0 | 0.0 | 0.0 | 0.0 |
| DEX0448_044.nt.1 | 42013.1 | 0.0 | 0.0 | 0.0 | 0.0 | 0.0 | 0.0 |
| DEX0448_044.nt.1 | 42013.2 | 0.0 | 0.0 | 0.0 | 0.0 | 0.0 | 0.0 |

[0483] Ovarian Cancer Chips

[0484] For ovarian cancer two different chip designs were evaluated with overlapping sets of a total of 19 samples, comparing the expression patterns of ovarian cancer derived total RNA to total RNA isolated from a pool of 9 normal ovarian tissues. For the Multi-Cancer Array Chip, all 19 samples (14 invasive carcinomas, 5 low malignant potential samples were analyzed and for the Ovarian Array Chip, a subset of 17 of these samples (13 invasive carcinomas, 4 low malignant potential samples) were assessed.

[0485] The results for the statistically significant up-regulated genes on the Ovarian Array Chip are shown in Table 9. The results for the Multi-Cancer Array Chip are shown in Table 10. The first two columns of each table contain information about the sequence itself (DEX ID, Oligo Name), the next columns show the results obtained for all (“ALL”) ovarian cancer samples, invasive carcinomas (“INV”) and low malignant potential (“LMP”) samples. ‘% up’ indicates the percentage of all experiments in which up-regulation of at least 2-fold was observed (n=19 for the Multi-Cancer Array Chip, n=17 for the Ovarian Array Chip), ‘% valid up’ indicates the percentage of experiments with valid expression values in which up-regulation of at least 2-fold was observed.

TABLE 9

| | | Ovr | | Ovr | | Ovr | |
|---|---|---|---|---|---|---|---|
| | | ALL | Ovr ALL | INV | Ovr INV | LMP | Ovr LMP |
| | Oligo | % up | % valid up | % up | % valid up | % up | % valid up |
| DEX ID | Name | n = 17 | n = 17 | n = 13 | n = 13 | n = 4 | n = 4 |
| DEX0448_010.nt.1 | 9880.01 | 17.6 | 21.4 | 15.4 | 18.2 | 25.0 | 33.3 |
| DEX0448_010.nt.1 | 9880.02 | 17.6 | 18.8 | 15.4 | 16.7 | 25.0 | 25.0 |
| DEX0448_011.nt.1 | 22483.01 | 11.8 | 11.8 | 7.7 | 7.7 | 25.0 | 25.0 |
| DEX0448_011.nt.1 | 22483.02 | 11.8 | 11.8 | 7.7 | 7.7 | 25.0 | 25.0 |
| DEX0448_016.nt.1 | 21617.01 | 0.0 | 0.0 | 0.0 | 0.0 | 0.0 | 0.0 |
| DEX0448_016.nt.1 | 21617.02 | 0.0 | 0.0 | 0.0 | 0.0 | 0.0 | 0.0 |
| DEX0448_016.nt.1 | 21619.01 | 0.0 | 0.0 | 0.0 | 0.0 | 0.0 | 0.0 |
| DEX0448_016.nt.1 | 21619.02 | 0.0 | 0.0 | 0.0 | 0.0 | 0.0 | 0.0 |
| DEX0448_016.nt.2 | 21613.01 | 0.0 | 0.0 | 0.0 | 0.0 | 0.0 | 0.0 |
| DEX0448_016.nt.2 | 21613.02 | 0.0 | 0.0 | 0.0 | 0.0 | 0.0 | 0.0 |
| DEX0448_016.nt.2 | 21617.01 | 0.0 | 0.0 | 0.0 | 0.0 | 0.0 | 0.0 |
| DEX0448_016.nt.2 | 21617.02 | 0.0 | 0.0 | 0.0 | 0.0 | 0.0 | 0.0 |
| DEX0448_016.nt.2 | 21619.01 | 0.0 | 0.0 | 0.0 | 0.0 | 0.0 | 0.0 |
| DEX0448_016.nt.2 | 21619.02 | 0.0 | 0.0 | 0.0 | 0.0 | 0.0 | 0.0 |
| DEX0448_016.nt.3 | 21617.01 | 0.0 | 0.0 | 0.0 | 0.0 | 0.0 | 0.0 |
| DEX0448_016.nt.3 | 21617.02 | 0.0 | 0.0 | 0.0 | 0.0 | 0.0 | 0.0 |
| DEX0448_016.nt.3 | 21619.01 | 0.0 | 0.0 | 0.0 | 0.0 | 0.0 | 0.0 |
| DEX0448_016.nt.3 | 21619.02 | 0.0 | 0.0 | 0.0 | 0.0 | 0.0 | 0.0 |
| DEX0448_034.nt.1 | 21613.01 | 0.0 | 0.0 | 0.0 | 0.0 | 0.0 | 0.0 |
| DEX0448_034.nt.1 | 21613.02 | 0.0 | 0.0 | 0.0 | 0.0 | 0.0 | 0.0 |
| DEX0448_034.nt.1 | 21619.01 | 0.0 | 0.0 | 0.0 | 0.0 | 0.0 | 0.0 |
| DEX0448_034.nt.1 | 21619.02 | 0.0 | 0.0 | 0.0 | 0.0 | 0.0 | 0.0 |

[0486] TABLE 10

| | | | Ovr | | Ovr | | Ovr |
|---|---|---|---|---|---|---|---|
| | | Ovr | Multi- | Ovr | Multi- | Ovr | Multi- |
| | | Multi- | Cancer | Multi- | Cancer | Multi- | Cancer |
| | | Cancer | ALL | Cancer | INV | Cancer | LMP |
| | Oligo | ALL % up | % valid | INV % up | % valid | LMP % up | % valid |
| DEX ID | Name | n = 19 | up n = 19 | n = 14 | up n = 14 | n = 5 | up n = 5 |
| DEX0448_016.nt.1 | 5354.0 | 0.0 | 0.0 | 0.0 | 0.0 | 0.0 | 0.0 |
| DEX0448_019.nt.1 | 1045.0 | 0.0 | 0.0 | 0.0 | 0.0 | 0.0 | 0.0 |
| DEX0448_026.nt.1 | 78479.0 | 0.0 | 0.0 | 0.0 | 0.0 | 0.0 | 0.0 |
| DEX0448_026.nt.1 | 78479.1 | 0.0 | 0.0 | 0.0 | 0.0 | 0.0 | 0.0 |
| DEX0448_026.nt.2 | 78479.0 | 0.0 | 0.0 | 0.0 | 0.0 | 0.0 | 0.0 |
| DEX0448_026.nt.2 | 78479.1 | 0.0 | 0.0 | 0.0 | 0.0 | 0.0 | 0.0 |
| DEX0448_028.nt.1 | 5305.0 | 5.3 | 5.6 | 7.1 | 7.7 | 0.0 | 0.0 |
| DEX0448_028.nt.1 | 5306.0 | 5.3 | 5.6 | 7.1 | 7.1 | 0.0 | 0.0 |
| DEX0448_028.nt.2 | 5305.0 | 5.3 | 5.6 | 7.1 | 7.7 | 0.0 | 0.0 |
| DEX0448_028.nt.2 | 5306.0 | 5.3 | 5.6 | 7.1 | 7.1 | 0.0 | 0.0 |
| DEX0448_034.nt.1 | 5354.0 | 0.0 | 0.0 | 0.0 | 0.0 | 0.0 | 0.0 |
| DEX0448_044.nt.1 | 42013.0 | 0.0 | 0.0 | 0.0 | 0.0 | 0.0 | 0.0 |
| DEX0448_044.nt.1 | 42013.1 | 0.0 | 0.0 | 0.0 | 0.0 | 0.0 | 0.0 |
| DEX0448_044.nt.1 | 42013.2 | 0.0 | 0.0 | 0.0 | 0.0 | 0.0 | 0.0 |

[0487] Prostate Cancer

[0488] For prostate cancer three different chip designs were evaluated with overlapping sets of a total of 29 samples, comparing the expression patterns of prostate cancer or benign disease derived total RNA to total RNA isolated from a pool of 35 normal prostate tissues. For the Prostate 1 Array and Prostate 2 Array Chips all 29 samples (17 prostate cancer samples 12 non-malignant disease samples) were analyzed. For the Multi-Cancer Array Chip a subset of 28 of these samples (16 prostate cancer samples, 12 non-malignant disease samples) were analyzed.

[0489] The results for the statistically significant up-regulated genes on the Prostate1 Array Chip and Prostate2 Array Chip are shown in Table 11. The results for the statistically significant up-regulated genes on the Multi-Cancer Array Chip are shown in Table 12. The first two columns of each table contain information about the sequence itself (DEX ID, Oligo Name), the next columns show the results obtained for prostate cancer samples (“CAN”) or non-malignant disease samples (“DIS”). ‘% up’ indicates the percentage of all experiments in which up-regulation of at least 2-fold was observed (n=29 for the Prostate2 Array Chip and the Multi-Cancer Array Chip), ‘% valid up’ indicates the percentage of experiments with valid expression values in which up-regulation of at least 2-fold was observed.

TABLE 11

| | | Pro | | | Pro2 |
|---|---|---|---|---|---|
| | | CAN | Pro CAN | Pro DIS | DIS % |
| | Oligo | % up | % valid up | % up | valid up |
| DEX ID | Name | n = 17 | n = 17 | n = 12 | n = 12 |
| DEX0448_010.nt.1 | 38723.02 | 0.0 | 0.0 | 0.0 | 0.0 |
| DEX0448_010.nt.1 | 38723.03 | 0.0 | 0.0 | 0.0 | 0.0 |
| DEX0448_014.nt.1 | 26889.01 | 0.0 | 0.0 | 0.0 | 0.0 |
| DEX0448_014.nt.1 | 26889.02 | 0.0 | 0.0 | 0.0 | 0.0 |
| DEX0448_014.nt.1 | 27099.01 | 0.0 | 0.0 | 0.0 | 0.0 |
| DEX0448_014.nt.1 | 27099.02 | 0.0 | 0.0 | 0.0 | 0.0 |
| DEX0448_018.nt.1 | 32638.01 | 0.0 | 0.0 | 0.0 | 0.0 |
| DEX0448_018.nt.1 | 32638.02 | 0.0 | 0.0 | 0.0 | 0.0 |
| DEX0448_018.nt.1 | 32638.03 | 0.0 | 0.0 | 8.3 | 11.1 |
| DEX0448_022.nt.1 | 29143.01 | 11.8 | 11.8 | 8.3 | 8.3 |
| DEX0448_022.nt.1 | 29143.02 | 5.9 | 5.9 | 8.3 | 9.1 |
| DEX0448_022.nt.1 | 29143.03 | 5.9 | 5.9 | 8.3 | 8.3 |
| DEX0448_022.nt.2 | 29143.01 | 11.8 | 11.8 | 8.3 | 8.3 |
| DEX0448_022.nt.2 | 29143.02 | 5.9 | 5.9 | 8.3 | 9.1 |
| DEX0448_022.nt.2 | 29143.03 | 5.9 | 5.9 | 8.3 | 8.3 |
| DEX0448_041.nt.1 | 28451.01 | 0.0 | 0.0 | 0.0 | 0.0 |
| DEX0448_041.nt.1 | 28451.02 | 0.0 | 0.0 | 0.0 | 0.0 |
| DEX0448_041.nt.1 | 32716.01 | 0.0 | 0.0 | 0.0 | 0.0 |
| DEX0448_041.nt.1 | 32716.02 | 0.0 | 0.0 | 0.0 | 0.0 |
| DEX0448_041.nt.1 | 32716.03 | 0.0 | 0.0 | 8.3 | 14.3 |
| DEX0448_041.nt.1 | 32718.01 | 0.0 | 0.0 | 0.0 | 0.0 |
| DEX0448_041.nt.1 | 32718.02 | 0.0 | 0.0 | 0.0 | 0.0 |
| DEX0448_041.nt.1 | 32718.03 | 0.0 | 0.0 | 0.0 | 0.0 |
| DEX0448_041.nt.1 | 32720.01 | 0.0 | 0.0 | 0.0 | 0.0 |
| DEX0448_041.nt.1 | 32720.02 | 0.0 | 0.0 | 0.0 | 0.0 |
| DEX0448_041.nt.1 | 32720.03 | 0.0 | 0.0 | 0.0 | 0.0 |
| DEX0448_041.nt.1 | 32724.01 | 0.0 | 0.0 | 0.0 | 0.0 |
| DEX0448_041.nt.1 | 32724.02 | 0.0 | 0.0 | 0.0 | 0.0 |
| DEX0448_041.nt.1 | 32724.03 | 0.0 | 0.0 | 0.0 | 0.0 |
| DEX0448_041.nt.2 | 32716.01 | 0.0 | 0.0 | 0.0 | 0.0 |
| DEX0448_041.nt.2 | 32716.02 | 0.0 | 0.0 | 0.0 | 0.0 |
| DEX0448_041.nt.2 | 32716.03 | 0.0 | 0.0 | 8.3 | 14.3 |

[0490] TABLE 12

| | | | Pro Multi- | | Pro Multi- |
|---|---|---|---|---|---|
| | | Pro Multi- | Cancer CAN | Pro Multi- | Cancer DIS |
| | Oligo | Cancer CAN | % valid up | Cancer DIS | % valid up |
| DEX ID | Name | % up n = 16 | n = 16 | % up n = 12 | n = 12 |
| DEX0448_016.nt.1 | 5354.0 | 0.0 | 0.0 | 0.0 | 0.0 |
| DEX0448_019.nt.1 | 1045.0 | 0.0 | 0.0 | 0.0 | 0.0 |
| DEX0448_026.nt.1 | 78479.0 | 0.0 | 0.0 | 0.0 | 0.0 |
| DEX0448_026.nt.1 | 78479.1 | 0.0 | 0.0 | 0.0 | 0.0 |
| DEX0448_026.nt.2 | 78479.0 | 0.0 | 0.0 | 0.0 | 0.0 |
| DEX0448_026.nt.2 | 78479.1 | 0.0 | 0.0 | 0.0 | 0.0 |
| DEX0448_028.nt.1 | 5305.0 | 0.0 | 0.0 | 0.0 | 0.0 |
| DEX0448_028.nt.1 | 5306.0 | 0.0 | 0.0 | 0.0 | 0.0 |
| DEX0448_028.nt.2 | 5305.0 | 0.0 | 0.0 | 0.0 | 0.0 |
| DEX0448_028.nt.2 | 5306.0 | 0.0 | 0.0 | 0.0 | 0.0 |
| DEX0448_034.nt.1 | 5354.0 | 0.0 | 0.0 | 0.0 | 0.0 |
| DEX0448_044.nt.1 | 42013.0 | 0.0 | 0.0 | 0.0 | 0.0 |
| DEX0448_044.nt.1 | 42013.1 | 0.0 | 0.0 | 0.0 | 0.0 |
| DEX0448_044.nt.1 | 42013.2 | 0.0 | 0.0 | 0.0 | 0.0 |

SEQ ID NO: 1-95 was up-regulated on various tissue microarrays. Accordingly, nucleotide SEQ ID NO: 1-95 or the encoded protein SEQ ID NO: 96-237 may be used as a cancer therapeutic or diagnostic target for the tissues in which expression is shown.

[0491] The following table lists the location (Oligo Location) where the microarray oligos (Oligo ID) map on the transcripts (D)EX ID) of the present invention. Each Oligo ID may have been printed multiple times on a single chip as replicates. The Oligo Name is an exemplary replicate (e.g. 1000.01) for the Oligo ID (e.g. 1000), and data from other replicates (e.g. 1000.02, 1000.03) may be reported. Additionally, the Array (Chip Name) that each oligo and oligo replicates were printed on is included.

| DEX ID | Oligo ID | Oligo Name | Chip Name | Oligo Location |
|---|---|---|---|---|
| DEX0448_001.nt.1 | 34940 | 34940.0 | Colon array | 404-463 |
| DEX0448_002.nt.1 | 39957 | 39957.0 | Colon array | 172-231 |
| DEX0448_002.nt.1 | 39958 | 39958.0 | Colon array | 124-183 |
| DEX0448_003.nt.1 | 32057 | 32057.0 | Colon array | 519-578 |
| DEX0448_004.nt.1 | 41210 | 41210.0 | Colon array | 424-483 |
| DEX0448_005.nt.2 | 36243 | 36243.0 | Colon array | 1134-1193 |
| DEX0448_006.nt.1 | 8410 | 8410.0 | Colon array | 110-169 |
| DEX0448_007.nt.1 | 26449 | 26449.0 | Colon array | 431-490 |
| DEX0448_008.nt.1 | 32851 | 32851.0 | Colon array | 209-268 |
| DEX0448_009.nt.1 | 40809 | 40809.0 | Colon array | 1893-1952 |
| DEX0448_009.nt.1 | 34680 | 34680.0 | Colon array | 834-893 |
| DEX0448_009.nt.1 | 40810 | 40810.0 | Colon array | 1853-1912 |
| DEX0448_010.nt.1 | 28423 | 28423.0 | Colon array | 49-108 |
| DEX0448_010.nt.1 | 953 | 953.0 | Lung array | 243-302 |
| DEX0448_010.nt.1 | 956 | 956.0 | Multi-Cancer array | 45-104 |
| DEX0448_010.nt.1 | 17869 | 17869.0 | Breast array | 44-103 |
| DEX0448_010.nt.1 | 955 | 955.0 | Lung array | 50-109 |
| DEX0448_010.nt.1 | 9880 | 9880.01 | Ovarian array | 49-108 |
| DEX0448_010.nt.1 | 38723 | 38723.01 | Prostate2 array | 50-109 |
| DEX0448_010.nt.1 | 835 | 835.0 | Lung array | 403-462 |
| DEX0448_010.nt.1 | 5749 | 5749.0 | Lung array | 1038-1097 |
| DEX0448_010.nt.1 | 31466 | 31466.0 | Breast array | 413-472 |
| DEX0448_010.nt.1 | 836 | 836.0 | Lung array | 383-442 |
| DEX0448_011.nt.1 | 22483 | 22483.02 | Ovarian array | 164-223 |
| DEX0448_011.nt.1 | 20711 | 20711.0 | Breast array | 164-223 |
| DEX0448_011.nt.1 | 8312 | 8312.0 | Colon array | 245-304 |
| DEX0448_013.nt.1 | 16006 | 16006.0 | Colon array | 413-472 |
| DEX0448_014.nt.2 | 27099 | 27099.01 | Prostate1 array | 257-316 |
| DEX0448_014.nt.1 | 37378 | 37378.0 | Colon array | 137-196 |
| DEX0448_014.nt.1 | 37376 | 37376.0 | Colon array | 137-196 |
| DEX0448_014.nt.1 | 26889 | 26889.02 | Prostate1 array | 170-229 |
| DEX0448_015.nt.1 | 38996 | 38996.0 | Colon array | 907-966 |
| DEX0448_015.nt.1 | 33348 | 33348.0 | Colon array | 476-535 |
| DEX0448_016.nt.1 | 22545 | 22545.0 | Breast array | 444-503 |
| DEX0448_016.nt.1 | 26543 | 26543.0 | Breast array | 202-261 |
| DEX0448_016.nt.1 | 21617 | 21617.01 | Ovarian array | 207-266 |
| DEX0448_016.nt.1 | 5354 | 5354.0 | Multi-Cancer array | 434-493 |
| DEX0448_016.nt.1 | 22546 | 22546.0 | Breast array | 414-473 |
| DEX0448_016.nt.1 | 21619 | 21619.01 | Ovarian array | 295-354 |
| DEX0448_016.nt.1 | 5353 | 5353.0 | Lung array | 445-504 |
| DEX0448_016.nt.2 | 26543 | 26543.0 | Breast array | 439-498 |
| DEX0448_016.nt.2 | 22545 | 22545.0 | Breast array | 681-740 |
| DEX0448_016.nt.2 | 21619 | 21619.01 | Ovarian array | 532-591 |
| DEX0448_016.nt.2 | 21613 | 21613.02 | Ovarian array | 815-874 |
| DEX0448_016.nt.2 | 22546 | 22546.0 | Breast array | 651-710 |
| DEX0448_016.nt.2 | 5354 | 5354.0 | Multi-Cancer array | 671-730 |
| DEX0448_016.nt.2 | 21617 | 21617.01 | Ovarian array | 444-503 |
| DEX0448_016.nt.2 | 5353 | 5353.0 | Lung array | 682-741 |
| DEX0448_016.nt.3 | 26543 | 26543.0 | Breast array | 68-127 |
| DEX0448_016.nt.3 | 22545 | 22545.0 | Breast array | 310-369 |
| DEX0448_016.nt.3 | 21617 | 21617.01 | Ovarian array | 73-132 |
| DEX0448_016.nt.3 | 5353 | 5353.0 | Lung array | 311-370 |
| DEX0448_016.nt.3 | 22546 | 22546.0 | Breast array | 280-339 |
| DEX0448_016.nt.3 | 5354 | 5354.0 | Multi-Cancer array | 300-359 |
| DEX0448_016.nt.3 | 21619 | 21619.01 | Ovarian array | 161-220 |
| DEX0448_017.nt.1 | 37895 | 37895.0 | Colon array | 863-922 |
| DEX0448_017.nt.1 | 37227 | 37227.0 | Colon array | 724-783 |
| DEX0448_017.nt.1 | 37239 | 37239.0 | Colon array | 319-378 |
| DEX0448_017.nt.1 | 29052 | 29052.0 | Breast array | 871-930 |
| DEX0448_017.nt.1 | 36180 | 36180.0 | Colon array | 551-610 |
| DEX0448_017.nt.1 | 36184 | 36184.0 | Colon array | 218-277 |
| DEX0448_017.nt.1 | 36182 | 36182.0 | Colon array | 724-783 |
| DEX0448_017.nt.1 | 36179 | 36179.0 | Colon array | 592-651 |
| DEX0448_017.nt.1 | 37228 | 37228.0 | Colon array | 694-753 |
| DEX0448_017.nt.1 | 36181 | 36181.0 | Colon array | 852-911 |
| DEX0448_017.nt.1 | 37240 | 37240.0 | Colon array | 299-358 |
| DEX0448_018.nt.1 | 13323 | 13323.0 | Breast array | 902-961 |
| DEX0448_018.nt.1 | 13245 | 13245.0 | Breast array | 1209-1268 |
| DEX0448_018.nt.1 | 13337 | 13337.0 | Breast array | 1195-1254 |
| DEX0448_018.nt.1 | 13299 | 13299.0 | Breast array | 853-912 |
| DEX0448_018.nt.1 | 13338 | 13338.0 | Breast array | 1165-1224 |
| DEX0448_018.nt.1 | 41823 | 41823.0 | Colon array | 544-603 |
| DEX0448_018.nt.1 | 41824 | 41824.0 | Colon array | 495-554 |
| DEX0448_018.nt.1 | 13320 | 13320.0 | Breast array | 1147-1206 |
| DEX0448_018.nt.1 | 32638 | 32638.03 | Prostate2 array | 897-956 |
| DEX0448_018.nt.1 | 13321 | 13321.0 | Breast array | 885-944 |
| DEX0448_019.nt.1 | 1045 | 1045.0 | Multi-Cancer array | 144-203 |
| DEX0448_019.nt.1 | 1044 | 1044.0 | Lung array | 154-213 |
| DEX0448_020.nt.1 | 39656 | 39656.0 | Colon array | 1033-1092 |
| DEX0448_020.nt.1 | 39655 | 39655.0 | Colon array | 1201-1260 |
| DEX0448_021.nt.1 | 35218 | 35218.0 | Colon array | 1621-1680 |
| DEX0448_021.nt.1 | 31155 | 31155.0 | Colon array | 892-951 |
| DEX0448_021.nt.1 | 30870 | 30870.0 | Colon array | 1621-1680 |
| DEX0448_021.nt.1 | 31146 | 31146.0 | Colon array | 603-662 |
| DEX0448_021.nt.1 | 30819 | 30819.0 | Colon array | 1621-1680 |
| DEX0448_021.nt.1 | 31157 | 31157.0 | Colon array | 1611-1670 |
| DEX0448_021.nt.1 | 31154 | 31154.0 | Colon array | 1364-1423 |
| DEX0448_021.nt.1 | 30931 | 30931.0 | Colon array | 653-712 |
| DEX0448_021.nt.2 | 30870 | 30870.0 | Colon array | 1926-1985 |
| DEX0448_021.nt.2 | 31154 | 31154.0 | Colon array | 1669-1728 |
| DEX0448_021.nt.2 | 31157 | 31157.0 | Colon array | 1916-1975 |
| DEX0448_021.nt.2 | 30819 | 30819.0 | Colon array | 1926-1985 |
| DEX0448_021.nt.2 | 31146 | 31146.0 | Colon array | 603-662 |
| DEX0448_021.nt.2 | 30931 | 30931.0 | Colon array | 653-712 |
| DEX0448_021.nt.2 | 31155 | 31155.0 | Colon array | 892-951 |
| DEX0448_021.nt.2 | 35218 | 35218.0 | Colon array | 1926-1985 |
| DEX0448_021.nt.3 | 31154 | 31154.0 | Colon array | 207-266 |
| DEX0448_021.nt.3 | 35218 | 35218.0 | Colon array | 464-523 |
| DEX0448_021.nt.3 | 30819 | 30819.0 | Colon array | 464-523 |
| DEX0448_021.nt.3 | 31157 | 31157.0 | Colon array | 454-513 |
| DEX0448_021.nt.3 | 30870 | 30870.0 | Colon array | 464-523 |
| DEX0448_022.nt.1 | 37415 | 37415.0 | Colon array | 452-511 |
| DEX0448_022.nt.1 | 792 | 792.0 | Lung array | 452-511 |
| DEX0448_022.nt.1 | 36878 | 36878.0 | Colon array | 502-561 |
| DEX0448_022.nt.1 | 791 | 791.0 | Lung array | 457-516 |
| DEX0448_022.nt.1 | 855 | 855.0 | Lung array | 285-344 |
| DEX0448_022.nt.1 | 804 | 804.0 | Lung array | 438-497 |
| DEX0448_022.nt.1 | 32151 | 32151.0 | Breast array | 163-222 |
| DEX0448_022.nt.1 | 803 | 803.0 | Lung array | 441-500 |
| DEX0448_022.nt.1 | 29143 | 29143.01 | Prostate2 array | 259-318 |
| DEX0448_022.nt.1 | 32150 | 32150.0 | Breast array | 203-262 |
| DEX0448_022.nt.2 | 804 | 804.0 | Lung array | 333-392 |
| DEX0448_022.nt.2 | 37415 | 37415.0 | Colon array | 347-406 |
| DEX0448_022.nt.2 | 791 | 791.0 | Lung array | 352-411 |
| DEX0448_022.nt.2 | 32151 | 32151.0 | Breast array | 58-117 |
| DEX0448_022.nt.2 | 36878 | 36878.0 | Colon array | 397-456 |
| DEX0448_022.nt.2 | 792 | 792.0 | Lung array | 347-406 |
| DEX0448_022.nt.2 | 29143 | 29143.01 | Prostate2 array | 154-213 |
| DEX0448_022.nt.2 | 803 | 803.0 | Lung array | 336-395 |
| DEX0448_022.nt.2 | 855 | 855.0 | Lung array | 180-239 |
| DEX0448_023.nt.1 | 22297 | 22297.0 | Colon array | 1117-1176 |
| DEX0448_024.nt.1 | 19607 | 19607.0 | Colon array | 199-258 |
| DEX0448_025.nt.1 | 40034 | 40034.0 | Colon array | 583-642 |
| DEX0448_025.nt.1 | 40033 | 40033.0 | Colon array | 784-843 |
| DEX0448_026.nt.1 | 78479 | 78479.0 | Multi-Cancer array | 1695-1754 |
| DEX0448_026.nt.1 | 41284 | 41284.0 | Colon array | 2169-2228 |
| DEX0448_026.nt.1 | 41210 | 41210.0 | Colon array | 1892-1951 |
| DEX0448_026.nt.2 | 78479 | 78479.0 | Multi-Cancer array | 1071-1130 |
| DEX0448_026.nt.2 | 41284 | 41284.0 | Colon array | 1545-1604 |
| DEX0448_027.nt.1 | 15836 | 15836.0 | Breast array | 5393-5452 |
| DEX0448_027.nt.1 | 32137 | 32137.0 | Breast array | 5280-5339 |
| DEX0448_027.nt.1 | 15311 | 15311.0 | Breast array | 4539-4598 |
| DEX0448_027.nt.1 | 15846 | 15846.0 | Breast array | 5624-5683 |
| DEX0448_027.nt.1 | 15845 | 15845.0 | Breast array | 5871-5930 |
| DEX0448_027.nt.1 | 15310 | 15310.0 | Breast array | 4588-4647 |
| DEX0448_027.nt.1 | 32136 | 32136.0 | Breast array | 5363-5422 |
| DEX0448_027.nt.1 | 15834 | 15834.0 | Breast array | 3574-3633 |
| DEX0448_027.nt.1 | 9623 | 9623.0 | Colon array | 5423-5482 |
| DEX0448_027.nt.1 | 15835 | 15835.0 | Breast array | 5423-5482 |
| DEX0448_027.nt.1 | 9622 | 9622.0 | Colon array | 5527-5586 |
| DEX0448_027.nt.1 | 15833 | 15833.0 | Breast array | 3594-3653 |
| DEX0448_027.nt.2 | 15845 | 15845.0 | Breast array | 5739-5798 |
| DEX0448_027.nt.2 | 15833 | 15833.0 | Breast array | 3462-3521 |
| DEX0448_027.nt.2 | 9622 | 9622.0 | Colon array | 5395-5454 |
| DEX0448_027.nt.2 | 15311 | 15311.0 | Breast array | 4407-4466 |
| DEX0448_027.nt.2 | 15846 | 15846.0 | Breast array | 5492-5551 |
| DEX0448_027.nt.2 | 15836 | 15836.0 | Breast array | 5261-5320 |
| DEX0448_027.nt.2 | 15310 | 15310.0 | Breast array | 4456-4515 |
| DEX0448_027.nt.2 | 15835 | 15835.0 | Breast array | 5291-5350 |
| DEX0448_027.nt.2 | 32136 | 32136.0 | Breast array | 5231-5290 |
| DEX0448_027.nt.2 | 9623 | 9623.0 | Colon array | 5291-5350 |
| DEX0448_027.nt.2 | 15834 | 15834.0 | Breast array | 3442-3501 |
| DEX0448_027.nt.2 | 32137 | 32137.0 | Breast array | 5148-5207 |
| DEX0448_027.nt.3 | 15836 | 15836.0 | Breast array | 7132-7191 |
| DEX0448_027.nt.3 | 15833 | 15833.0 | Breast array | 4013-4072 |
| DEX0448_027.nt.3 | 9622 | 9622.0 | Colon array | 7266-7325 |
| DEX0448_027.nt.3 | 32137 | 32137.0 | Breast array | 7019-7078 |
| DEX0448_027.nt.3 | 9623 | 9623.0 | Colon array | 7162-7221 |
| DEX0448_027.nt.3 | 15835 | 15835.0 | Breast array | 7162-7221 |
| DEX0448_027.nt.3 | 32136 | 32136.0 | Breast array | 7102-7161 |
| DEX0448_027.nt.3 | 15310 | 15310.0 | Breast array | 6327-6386 |
| DEX0448_027.nt.3 | 15834 | 15834.0 | Breast array | 3993-4052 |
| DEX0448_027.nt.3 | 15846 | 15846.0 | Breast array | 7363-7422 |
| DEX0448_027.nt.3 | 15311 | 15311.0 | Breast array | 6278-6337 |
| DEX0448_027.nt.3 | 15845 | 15845.0 | Breast array | 7610-7669 |
| DEX0448_027.nt.4 | 15836 | 15836.0 | Breast array | 5124-5183 |
| DEX0448_027.nt.4 | 15311 | 15311.0 | Breast array | 4270-4329 |
| DEX0448_027.nt.4 | 32136 | 32136.0 | Breast array | 5094-5153 |
| DEX0448_027.nt.4 | 15833 | 15833.0 | Breast array | 3325-3384 |
| DEX0448_027.nt.4 | 15834 | 15834.0 | Breast array | 3305-3364 |
| DEX0448_027.nt.4 | 9623 | 9623.0 | Colon array | 5154-5213 |
| DEX0448_027.nt.4 | 15835 | 15835.0 | Breast array | 5154-5213 |
| DEX0448_027.nt.4 | 9622 | 9622.0 | Colon array | 5258-5317 |
| DEX0448_027.nt.4 | 32137 | 32137.0 | Breast array | 5011-5070 |
| DEX0448_027.nt.4 | 15310 | 15310.0 | Breast array | 4319-4378 |
| DEX0448_027.nt.5 | 15835 | 15835.0 | Breast array | 5154-5213 |
| DEX0448_027.nt.5 | 9623 | 9623.0 | Colon array | 5154-5213 |
| DEX0448_027.nt.5 | 15836 | 15836.0 | Breast array | 5124-5183 |
| DEX0448_027.nt.5 | 15834 | 15834.0 | Breast array | 3305-3364 |
| DEX0448_027.nt.5 | 9622 | 9622.0 | Colon array | 5258-5317 |
| DEX0448_027.nt.5 | 15833 | 15833.0 | Breast array | 3325-3384 |
| DEX0448_027.nt.5 | 32136 | 32136.0 | Breast array | 5094-5153 |
| DEX0448_027.nt.5 | 15311 | 15311.0 | Breast array | 4270-4329 |
| DEX0448_027.nt.5 | 32137 | 32137.0 | Breast array | 5011-5070 |
| DEX0448_027.nt.6 | 15846 | 15846.0 | Breast array | 1797-1856 |
| DEX0448_027.nt.6 | 15835 | 15835.0 | Breast array | 1596-1655 |
| DEX0448_027.nt.6 | 9622 | 9622.0 | Colon array | 1700-1759 |
| DEX0448_027.nt.6 | 15845 | 15845.0 | Breast array | 2044-2103 |
| DEX0448_027.nt.6 | 9623 | 9623.0 | Colon array | 1596-1655 |
| DEX0448_027.nt.6 | 15310 | 15310.0 | Breast array | 761-820 |
| DEX0448_027.nt.6 | 15836 | 15836.0 | Breast array | 1566-1625 |
| DEX0448_027.nt.6 | 32137 | 32137.0 | Breast array | 1453-1512 |
| DEX0448_027.nt.6 | 32136 | 32136.0 | Breast array | 1536-1595 |
| DEX0448_027.nt.6 | 15311 | 15311.0 | Breast array | 712-771 |
| DEX0448_028.nt.1 | 5305 | 5305.0 | Multi-Cancer array | 679-738 |
| DEX0448_028.nt.1 | 1263 | 1263.0 | Lung array | 653-712 |
| DEX0448_028.nt.1 | 1265 | 1265.0 | Lung array | 648-707 |
| DEX0448_028.nt.1 | 1262 | 1262.0 | Lung array | 674-733 |
| DEX0448_028.nt.1 | 5306 | 5306.0 | Multi-Cancer array | 648-707 |
| DEX0448_028.nt.1 | 1320 | 1320.0 | Lung array | 988-1047 |
| DEX0448_028.nt.1 | 1264 | 1264.0 | Lung array | 679-738 |
| DEX0448_028.nt.2 | 1262 | 1262.0 | Lung array | 423-482 |
| DEX0448_028.nt.2 | 1264 | 1264.0 | Lung array | 428-487 |
| DEX0448_028.nt.2 | 5305 | 5305.0 | Multi-Cancer array | 428-487 |
| DEX0448_028.nt.2 | 1263 | 1263.0 | Lung array | 402-461 |
| DEX0448_028.nt.2 | 1320 | 1320.0 | Lung array | 812-871 |
| DEX0448_028.nt.2 | 1265 | 1265.0 | Lung array | 397-456 |
| DEX0448_028.nt.2 | 5306 | 5306.0 | Multi-Cancer array | 397-456 |
| DEX0448_029.nt.1 | 38381 | 38381.0 | Colon array | 1892-1951 |
| DEX0448_029.nt.1 | 28733 | 28733.0 | Colon array | 2187-2246 |
| DEX0448_029.nt.1 | 38383 | 38383.0 | Colon array | 2546-2605 |
| DEX0448_029.nt.1 | 38384 | 38384.0 | Colon array | 2526-2585 |
| DEX0448_029.nt.1 | 38382 | 38382.0 | Colon array | 1872-1931 |
| DEX0448_029.nt.1 | 28734 | 28734.0 | Colon array | 2147-2206 |
| DEX0448_029.nt.2 | 38383 | 38383.0 | Colon array | 2101-2160 |
| DEX0448_029.nt.2 | 28733 | 28733.0 | Colon array | 1742-1801 |
| DEX0448_029.nt.2 | 38381 | 38381.0 | Colon array | 1447-1506 |
| DEX0448_029.nt.2 | 38384 | 38384.0 | Colon array | 2081-2140 |
| DEX0448_029.nt.2 | 38382 | 38382.0 | Colon array | 1427-1486 |
| DEX0448_029.nt.2 | 28734 | 28734.0 | Colon array | 1702-1761 |
| DEX0448_029.nt.3 | 28733 | 28733.0 | Colon array | 1745-1804 |
| DEX0448_029.nt.3 | 28734 | 28734.0 | Colon array | 1705-1764 |
| DEX0448_029.nt.3 | 38382 | 38382.0 | Colon array | 1430-1489 |
| DEX0448_029.nt.3 | 38384 | 38384.0 | Colon array | 2084-2143 |
| DEX0448_029.nt.3 | 38381 | 38381.0 | Colon array | 1450-1509 |
| DEX0448_029.nt.3 | 38383 | 38383.0 | Colon array | 2104-2163 |
| DEX0448_029.nt.4 | 28734 | 28734.0 | Colon array | 2219-2278 |
| DEX0448_029.nt.4 | 38382 | 38382.0 | Colon array | 1944-2003 |
| DEX0448_029.nt.4 | 38384 | 38384.0 | Colon array | 2598-2657 |
| DEX0448_029.nt.4 | 38381 | 38381.0 | Colon array | 1964-2023 |
| DEX0448_029.nt.4 | 28733 | 28733.0 | Colon array | 2259-2318 |
| DEX0448_029.nt.5 | 38383 | 38383.0 | Colon array | 1910-1969 |
| DEX0448_029.nt.5 | 38381 | 38381.0 | Colon array | 1256-1315 |
| DEX0448_029.nt.5 | 38382 | 38382.0 | Colon array | 1236-1295 |
| DEX0448_029.nt.5 | 38384 | 38384.0 | Colon array | 1890-1949 |
| DEX0448_029.nt.5 | 28734 | 28734.0 | Colon array | 1511-1570 |
| DEX0448_029.nt.6 | 38383 | 38383.0 | Colon array | 1944-2003 |
| DEX0448_029.nt.6 | 28733 | 28733.0 | Colon array | 1585-1644 |
| DEX0448_029.nt.6 | 38381 | 38381.0 | Colon array | 1388-1447 |
| DEX0448_029.nt.6 | 38384 | 38384.0 | Colon array | 1924-1983 |
| DEX0448_029.nt.6 | 38382 | 38382.0 | Colon array | 1368-1427 |
| DEX0448_029.nt.6 | 28734 | 28734.0 | Colon array | 1545-1604 |
| DEX0448_029.nt.7 | 28733 | 28733.0 | Colon array | 1332-1391 |
| DEX0448_029.nt.7 | 28734 | 28734.0 | Colon array | 1292-1351 |
| DEX0448_029.nt.7 | 38382 | 38382.0 | Colon array | 1017-1076 |
| DEX0448_029.nt.7 | 38384 | 38384.0 | Colon array | 1671-1730 |
| DEX0448_029.nt.7 | 38381 | 38381.0 | Colon array | 1037-1096 |
| DEX0448_029.nt.7 | 38383 | 38383.0 | Colon array | 1691-1750 |
| DEX0448_030.nt.1 | 29604 | 29604.0 | Colon array | 1800-1859 |
| DEX0448_030.nt.1 | 40868 | 40868.0 | Colon array | 1413-1472 |
| DEX0448_030.nt.1 | 40867 | 40867.0 | Colon array | 1536-1595 |
| DEX0448_030.nt.1 | 29603 | 29603.0 | Colon array | 1840-1899 |
| DEX0448_032.nt.1 | 37239 | 37239.0 | Colon array | 258-317 |
| DEX0448_032.nt.1 | 36179 | 36179.0 | Colon array | 531-590 |
| DEX0448_032.nt.1 | 37227 | 37227.0 | Colon array | 663-722 |
| DEX0448_032.nt.1 | 37240 | 37240.0 | Colon array | 238-297 |
| DEX0448_032.nt.1 | 36184 | 36184.0 | Colon array | 157-216 |
| DEX0448_032.nt.1 | 36180 | 36180.0 | Colon array | 490-549 |
| DEX0448_032.nt.1 | 36182 | 36182.0 | Colon array | 663-722 |
| DEX0448_032.nt.1 | 37228 | 37228.0 | Colon array | 633-692 |
| DEX0448_033.nt.1 | 22294 | 22294.0 | Breast array | 1462-1521 |
| DEX0448_034.nt.1 | 22546 | 22546.0 | Breast array | 236-295 |
| DEX0448_034.nt.1 | 21619 | 21619.0 | Ovarian array | 117-176 |
| DEX0448_034.nt.1 | 5353 | 5353.0 | Lung array | 267-326 |
| DEX0448_034.nt.1 | 22545 | 22545.0 | Breast array | 266-325 |
| DEX0448_034.nt.1 | 5354 | 5354.0 | Multi-Cancer array | 256-315 |
| DEX0448_034.nt.1 | 21613 | 21613.02 | Ovarian array | 400-459 |
| DEX0448_035.nt.1 | 3729 | 3729.0 | Lung array | 3628-3687 |
| DEX0448_035.nt.1 | 23863 | 23863.0 | Colon array | 4553-4612 |
| DEX0448_035.nt.1 | 23862 | 23862.0 | Colon array | 4617-4676 |
| DEX0448_035.nt.1 | 40309 | 40309.0 | Breast array | 4890-4949 |
| DEX0448_035.nt.2 | 23863 | 23863.0 | Colon array | 4372-4431 |
| DEX0448_035.nt.2 | 3729 | 3729.0 | Lung array | 3447-3506 |
| DEX0448_035.nt.2 | 40309 | 40309.0 | Breast array | 4709-4768 |
| DEX0448_035.nt.2 | 23862 | 23862.0 | Colon array | 4436-4495 |
| DEX0448_035.nt.3 | 3729 | 3729.0 | Lung array | 3358-3417 |
| DEX0448_035.nt.3 | 23863 | 23863.0 | Colon array | 4283-4342 |
| DEX0448_035.nt.3 | 40309 | 40309.0 | Breast array | 4620-4679 |
| DEX0448_035.nt.3 | 23862 | 23862.0 | Colon array | 4347-4406 |
| DEX0448_035.nt.4 | 40309 | 40309.0 | Breast array | 4106-4165 |
| DEX0448_035.nt.4 | 3729 | 3729.0 | Lung array | 2844-2903 |
| DEX0448_035.nt.4 | 23863 | 23863.0 | Colon array | 3769-3828 |
| DEX0448_036.nt.1 | 36812 | 36812.0 | Colon array | 318-377 |
| DEX0448_036.nt.1 | 29533 | 29533.0 | Colon array | 660-719 |
| DEX0448_036.nt.1 | 36811 | 36811.0 | Colon array | 348-407 |
| DEX0448_036.nt.1 | 29534 | 29534.0 | Colon array | 640-699 |
| DEX0448_036.nt.1 | 29532 | 29532.0 | Colon array | 1444-1503 |
| DEX0448_036.nt.1 | 29540 | 29540.0 | Colon array | 1265-1324 |
| DEX0448_036.nt.2 | 29539 | 29539.0 | Colon array | 983-1042 |
| DEX0448_036.nt.2 | 29532 | 29532.0 | Colon array | 1250-1309 |
| DEX0448_036.nt.3 | 29539 | 29539.0 | Colon array | 289-348 |
| DEX0448_036.nt.3 | 29532 | 29532.0 | Colon array | 556-615 |
| DEX0448_036.nt.3 | 29540 | 29540.0 | Colon array | 54-113 |
| DEX0448_037.nt.1 | 36341 | 36341.0 | Colon array | 645-704 |
| DEX0448_037.nt.1 | 36342 | 36342.0 | Colon array | 565-624 |
| DEX0448_037.nt.2 | 36341 | 36341.0 | Colon array | 738-797 |
| DEX0448_037.nt.2 | 36342 | 36342.0 | Colon array | 658-717 |
| DEX0448_037.nt.3 | 36341 | 36341.0 | Colon array | 1583-1642 |
| DEX0448_037.nt.3 | 36342 | 36342.0 | Colon array | 1503-1562 |
| DEX0448_037.nt.4 | 36341 | 36341.0 | Colon array | 774-833 |
| DEX0448_037.nt.4 | 36342 | 36342.0 | Colon array | 694-753 |
| DEX0448_037.nt.5 | 36341 | 36341.0 | Colon array | 774-833 |
| DEX0448_037.nt.6 | 36342 | 36342.0 | Colon array | 694-753 |
| DEX0448_038.nt.1 | 20896 | 20896.0 | Colon array | 40-99 |
| DEX0448_038.nt.1 | 20895 | 20895.0 | Colon array | 80-139 |
| DEX0448_039.nt.1 | 38855 | 38855.0 | Colon array | 913-972 |
| DEX0448_040.nt.1 | 40756 | 40756.0 | Colon array | 191-250 |
| DEX0448_040.nt.1 | 31347 | 31347.0 | Colon array | 237-296 |
| DEX0448_040.nt.1 | 40755 | 40755.0 | Colon array | 237-296 |
| DEX0448_040.nt.2 | 40756 | 40756.0 | Colon array | 487-546 |
| DEX0448_040.nt.2 | 7435 | 7435.0 | Lung array | 259-318 |
| DEX0448_040.nt.2 | 31347 | 31347.0 | Colon array | 533-592 |
| DEX0448_040.nt.2 | 7434 | 7434.0 | Lung array | 299-358 |
| DEX0448_040.nt.2 | 31346 | 31346.0 | Colon array | 665-724 |
| DEX0448_040.nt.2 | 40755 | 40755.0 | Colon array | 533-592 |
| DEX0448_040.nt.3 | 7435 | 7435.0 | Lung array | 268-327 |
| DEX0448_040.nt.3 | 40755 | 40755.0 | Colon array | 542-601 |
| DEX0448_040.nt.3 | 7434 | 7434.0 | Lung array | 308-367 |
| DEX0448_040.nt.3 | 31347 | 31347.0 | Colon array | 542-601 |
| DEX0448_040.nt.3 | 31346 | 31346.0 | Colon array | 674-733 |
| DEX0448_040.nt.3 | 40756 | 40756.0 | Colon array | 496-555 |
| DEX0448_040.nt.4 | 7434 | 7434.0 | Lung array | 249-308 |
| DEX0448_040.nt.4 | 31346 | 31346.0 | Colon array | 615-674 |
| DEX0448_040.nt.4 | 31347 | 31347.0 | Colon array | 483-542 |
| DEX0448_040.nt.4 | 7435 | 7435.0 | Lung array | 209-268 |
| DEX0448_040.nt.4 | 40755 | 40755.0 | Colon array | 483-542 |
| DEX0448_040.nt.5 | 7435 | 7435.0 | Lung array | 155-214 |
| DEX0448_040.nt.5 | 31347 | 31347.0 | Colon array | 429-488 |
| DEX0448_040.nt.5 | 40756 | 40756.0 | Colon array | 383-442 |
| DEX0448_040.nt.5 | 7434 | 7434.0 | Lung array | 195-254 |
| DEX0448_040.nt.5 | 31346 | 31346.0 | Colon array | 561-620 |
| DEX0448_040.nt.5 | 40755 | 40755.0 | Colon array | 429-488 |
| DEX0448_040.nt.6 | 35943 | 35943.0 | Colon array | 822-881 |
| DEX0448_040.nt.6 | 40756 | 40756.0 | Colon array | 1684-1743 |
| DEX0448_040.nt.6 | 31347 | 31347.0 | Colon array | 1730-1789 |
| DEX0448_040.nt.6 | 35944 | 35944.0 | Colon array | 779-838 |
| DEX0448_040.nt.6 | 7434 | 7434.0 | Lung array | 1496-1555 |
| DEX0448_040.nt.6 | 7435 | 7435.0 | Lung array | 1456-1515 |
| DEX0448_040.nt.6 | 31346 | 31346.0 | Colon array | 1862-1921 |
| DEX0448_040.nt.6 | 40755 | 40755.0 | Colon array | 1730-1789 |
| DEX0448_040.nt.7 | 31346 | 31346.0 | Colon array | 310-369 |
| DEX0448_040.nt.7 | 40756 | 40756.0 | Colon array | 132-191 |
| DEX0448_040.nt.7 | 31347 | 31347.0 | Colon array | 178-237 |
| DEX0448_041.nt.1 | 32724 | 32724.03 | Prostate2 array | 1976-2035 |
| DEX0448_041.nt.1 | 32720 | 32720.01 | Prostate2 array | 2016-2075 |
| DEX0448_041.nt.1 | 28451 | 28451.01 | Prostate1 array | 2240-2299 |
| DEX0448_041.nt.1 | 32216 | 32216.0 | Colon array | 1632-1691 |
| DEX0448_041.nt.1 | 32718 | 32718.01 | Prostate2 array | 2016-2075 |
| DEX0448_041.nt.1 | 32716 | 32716.03 | Prostate2 array | 168-227 |
| DEX0448_041.nt.2 | 32216 | 32216.0 | Colon array | 1632-1691 |
| DEX0448_041.nt.2 | 32716 | 32716.03 | Prostate2 array | 168-227 |
| DEX0448_042.nt.1 | 7412 | 7412.0 | Lung array | 1245-1304 |
| DEX0448_042.nt.1 | 29231 | 29231.0 | Colon array | 1278-1337 |
| DEX0448_042.nt.1 | 29272 | 29272.0 | Colon array | 1587-1646 |
| DEX0448_042.nt.1 | 7413 | 7413.0 | Lung array | 1158-1217 |
| DEX0448_042.nt.1 | 29232 | 29232.0 | Colon array | 1229-1288 |
| DEX0448_042.nt.1 | 29290 | 29290.0 | Colon array | 1349-1408 |
| DEX0448_042.nt.1 | 29271 | 29271.0 | Colon array | 1627-1686 |
| DEX0448_043.nt.1 | 9043 | 9043.0 | Colon array | 181-240 |
| DEX0448_043.nt.1 | 22586 | 22586.0 | Breast array | 117-176 |
| DEX0448_043.nt.2 | 966 | 966.0 | Lung array | 716-775 |
| DEX0448_043.nt.2 | 9043 | 9043.0 | Colon array | 240-299 |
| DEX0448_043.nt.2 | 943 | 943.0 | Lung array | 942-1001 |
| DEX0448_043.nt.2 | 960 | 960.0 | Lung array | 436-495 |
| DEX0448_043.nt.2 | 22585 | 22585.0 | Breast array | 222-281 |
| DEX0448_043.nt.2 | 939 | 939.0 | Lung array | 658-717 |
| DEX0448_043.nt.2 | 944 | 944.0 | Lung array | 922-981 |
| DEX0448_043.nt.2 | 22586 | 22586.0 | Breast array | 178-237 |
| DEX0448_043.nt.2 | 940 | 940.0 | Lung array | 521-580 |
| DEX0448_043.nt.2 | 946 | 946.0 | Lung array | 1076-1135 |
| DEX0448_044.nt.1 | 36803 | 36803.0 | Colon array | 433-492 |
| DEX0448_044.nt.1 | 42013 | 42013.0 | Multi-Cancer array | 628-687 |
| DEX0448_044.nt.2 | 36803 | 36803.0 | Colon array | 827-886 |

### Example 2b

### Relative Quantitation of Gene Expression

[0492] Real-Time quantitative PCR with fluorescent Taqman® probes is a quantitation detection system utilizing the 5′-3′ nuclease activity of Taq DNA polymerase. The method uses an internal fluorescent oligonucleotide probe (Taqman®) labeled with a 5′ reporter dye and a downstream, 3′ quencher dye. During PCR, the 5′-3′ nuclease activity of Taq DNA polymerase releases the reporter, whose fluorescence can then be detected by the laser detector of the Model 7700 Sequence Detection System (PE Applied Biosystems, Foster City, Calif., USA). Amplification of an endogenous control is used to standardize the amount of sample RNA added to the reaction and normalize for Reverse Transcriptase (RT) efficiency. Either cyclophilin, glyceraldehyde-3-phosphate dehydrogenase (GAPDH), ATPase, or 18S ribosomal RNA (rRNA) is used as this endogenous control. To calculate relative quantitation between all the samples studied, the target RNA levels for one sample were used as the basis for comparative results (calibrator). Quantitation relative to the “calibrator” can be obtained using the comparative method (User Bulletin #2: ABI PRISM 7700 Sequence Detection System).

[0493] The tissue distribution and the level of the target gene are evaluated for every sample in normal and cancer tissues. Total RNA is extracted from normal tissues, cancer tissues, and from cancers and the corresponding matched adjacent tissues. Subsequently, first strand cDNA is prepared with reverse transcriptase and the polymerase chain reaction is done using primers and Taqman® probes specific to each target gene. The results are analyzed using the ABI PRISM 7700 Sequence Detector. The absolute numbers are relative levels of expression of the target gene in a particular tissue compared to the calibrator tissue.

[0494] One of ordinary skill can design appropriate primers. The relative levels of expression of the CSNA versus normal tissues and other cancer tissues can then be determined. All the values are compared to the calibrator. Normal RNA samples are commercially available pools, originated by pooling samples of a particular tissue from different individuals.

[0495] The relative levels of expression of the CSNA in pairs of matched samples may also be determined. A matched pair is formed by mRNA from the cancer sample for a particular tissue and mRNA from the normal adjacent sample for that same tissue from the same individual. All the values are compared to the calibrator.

[0496] In the analysis of matching samples, the CSNAs show a high degree of tissue specificity for the tissue of interest. These results confirm the tissue specificity results obtained with normal pooled samples. Further, the level of mRNA expression in cancer samples and the isogenic normal adjacent tissue from the same individual are compared. This comparison provides an indication of specificity for the cancer state (e.g. higher levels of mRNA expression in the cancer sample compared to the normal adjacent).

[0497] Information on the samples tested in the QPCR experiments below include the Sample ID (Smpl ID), Organ, Tissue Type (Tiss Type), Diagnosis (DIAG), Disease Detail, and Stage or Grade (STG or GRD) in following table.

| Sample | | TISS | | | |
|---|---|---|---|---|---|
| ID | ORGAN | TYPE | DIAG | DISEASE DETAIL | STG or GRD |
| AS12 | Colon | CAN | | T | StageB |
| AS12 | Colon | NAT | | NL | |
| AS46 | Colon | CAN | | malignant | T3N1MX |
| AS46 | Colon | NAT | | NAT | |
| B34 | Colon | CAN | Adenocarcinoma | | |
| B34 | Colon | NAT | | NAT | |
| C9XR | Colon | CAN | | Rectum Cancer | Stage D |
| C9XR | Colon | NAT | | NAT | |
| CM67 | Colon | CAN | Adenocarcinoma | Adenocarcinoma | Stage II |
| | | | | of cecum, | |
| | | | | Moderately | |
| | | | | differentiated | |
| CM67 | Colon | NAT | | NAT | |
| TX89 | Colon | CAN | Adenocarcinoma | Adenocarcinoma | Stave IV |
| | | | | of Transverse | |
| | | | | Colon | |
| TX89 | Colon | NAT | | NAT | |
| AS43 | Colon | CAN | Adenocarcinoma | malignant | |
| AS43 | Colon | NAT | Adenocarcinoma | NAT | |
| AS98 | Colon | CAN | Adenocarcinoma | Moderately to | Duke's C |
| | | | | poorly | |
| | | | | differentiated | |
| | | | | adenocarcinoma | |
| AS98 | Colon | NAT | | NAT | |
| RS53 | Colon | CAN | Adenocarcinoma | moderately | |
| | | | | differentiated | |
| | | | | adenocarcinoma | |
| RS53 | Colon | NAT | Adenocarcinoma | NAT | |
| RC01 | Colon | CAN | Cancer | | Stage IV |
| RC01 | Colon | NAT | | NAT | |
| SG27 | Colon | CAN | | malig | Stage B |
| SG27 | Colon | NAT | | NAT | |
| DC19 | Colon | CAN | | T | Stage B |
| DC19 | Colon | NAT | | NL | |
| 401C | Colon | CAN | Adenocarcinoma | Adenocarcinoma | Stage III |
| | | | | of ascending | |
| | | | | colon and cecum | |
| 401C | Colon | NAT | | NAT | |
| CM12 | Colon | CAN | | T | Stage D |
| CM12 | Colon | NAT | Adenocarcinoma | Nat | |
| TX01 | Colon | CAN | Adenocarcinoma | Moderately | Stage II; |
| | | | | differentiated | T3NoMo |
| | | | | adenocarcinoma | |
| | | | | of cecum | |
| TX01 | Colon | NAT | | NAT | |
| 030B | Urinary | CAN | Carcinoma | invasive | Stage |
| | Bladder | | | Carcinoma, poorly | III, Grade 3 |
| | | | | differentiated | |
| 030B | Urinary | NAT | | NAT | |
| | Bladder | | | | |
| TR17 | Urinary | CAN | Carcinoma | transitional | StageII/Grade |
| | Bladder | | | cell carcinoma | III |
| TR17 | Urinary | NAT | | NAT | |
| | Bladder | | | | |
| 520B | Urinary | CAN | Sarcomatoid | Sarcomatoid | |
| | Bladder | | transitional | transitional | |
| | | | cell | cell carcinoma | |
| | | | carcinoma | | |
| 520B | Urinary | NAT | | NAT | |
| | Bladder | | | | |
| KS52 | Cervix | CAN | Squamous | Keratinizing | IIIB, well |
| | | | cell | Squamous Cell | diff. G1; |
| | | | carcinoma | Carcinoma | T3bNxM0 |
| KS52 | Cervix | NAT | | NAT | |
| NK23 | Cervix | CAN | | Nonkeratinizing | FIGO IIIB, |
| | | | | Large Cell | undiff. G4; |
| | | | | | T3bNxM0 |
| NK23 | Cervix | NAT | | NAT | |
| NKS54 | Cervix | CAN | Squamous | Nonkeratinizing | IIB, mod |
| | | | cell | Squamous Cell | diff. G2; |
| | | | carcinoma | Carcinoma | T2bNxM0 |
| NKS54 | Cervix | NAT | | NAT | |
| NKS55 | Cervix | CAN | Squamous | Nonkeratinizing | IIIB, Mod |
| | | | cell | Squamous Cell | diff. G2; |
| | | | carcinoma | Carcinoma | T3bNxM0 |
| NKS55 | Cervix | NAT | | NAT | |
| NKS81 | Cervix | CAN | Squamous | large cell | IIB |
| | | | cell | nonkeratinizing | |
| | | | carcinoma | sq carc, IIB, | |
| | | | | moderately diff | |
| NKS81 | Cervix | NAT | | NAT | |
| 10479 | Endometrium | CAN | | malignant mixed | T?, Nx, M1 |
| | | | | mullerian tumor | |
| 10479 | Endometrium | NAT | | NAT | |
| 28XA | Endometrium | CAN | Endometrial | malignant | II/III |
| | | | adenocarcinoma | | |
| 28XA | Endometrium | NAT | | NAT | II/III |
| 8XA | Endometrium | CAN | mod. diff, | | |
| | | | invasive, | | |
| | | | squamous | | |
| | | | differentiation, | | |
| | | | FIGO- | | |
| | | | II | | |
| 8XA | Endometrium | NAT | | NAT | |
| 106XD | Kidney | CAN | Renal cell | renal cell | 3 |
| | | | carcinoma | carcinoma, clear | |
| | | | | cell, localized | |
| 106XD | Kidney | NAT | | NL | |
| 107XD | Kidney | CAN | Renal cell | renal cell | G III |
| | | | carcinoma | carcinoma, clear | |
| | | | | cell, with | |
| | | | | metastatic | |
| 107XD | Kidney | NAT | | NL | |
| 109XD | Kidney | CAN | | Malignant | G III |
| 109XD | Kidney | NAT | | NL | |
| 10XD | Kidney | CAN | Renal cell | renal cell | 3 |
| | | | carcinoma | carcinoma, clear | |
| | | | | cell, localized, | |
| | | | | grade 2-3 | |
| 10XD | Kidney | NAT | | NL | |
| 22K | Kidney | CAN | Renal cell | Renal cell | G2, Mod. |
| | | | carcinoma | carcinoma | Diff. |
| 22K | Kidney | NAT | | NAT | |
| 15XA | Liver | CAN | | Sarcoma, Retroperitoneal | Grade-2 |
| | | | | Tumor | |
| 15XA | Liver | NAT | | CA | St. I, G4 |
| 174L | Liver | CAN | Hepatocellular | Moderate to well | |
| | | | carcinoma | differentiated | |
| | | | | hepatocellular | |
| | | | | carcinoma | |
| 174L | Liver | NAT | Hepatocellular | NAT | |
| | | | carcinoma | | |
| 187L | Liver | CAN | Adenocarcinoma | Metastatic | Liver |
| | | | | Adenocarcinoma | (Gallbladder) |
| 187L | Liver | NAT | | NAT | |
| 205L | Lung | CAN | Adenocarcinoma | poorly | T2, N1, Mx |
| | | | | differentiated | |
| | | | | adenocarcinoma | |
| 205L | Lung | NAT | | NAT | |
| 315L | Lung | CAN | Squamous | | |
| | | | cell | | |
| | | | carcinoma | | |
| 315L | Lung | NAT | Adenocarcinoma | NAT | |
| 507L | Lung | CAN | Bronchioloalveolar | bronchioalveolar | Stage IB, G1, |
| | | | carcinoma | carcinoma | well diff. |
| 507L | Lung | NAT | | NAT | |
| 528L | Lung | CAN | Adenocarcinoma | Adenocarcinoma | St. IV, T2N0M1, |
| | | | | | infiltrating |
| | | | | | poorly diff. |
| 528L | Lung | NAT | | NAT | |
| 8837L | Lung | CAN | Squamous | Squamous cell | T2, N0, M0 |
| | | | cell | carcinoma | |
| | | | carcinoma | | |
| 8837L | Lung | NAT | | NAT | |
| AC11 | Lung | CAN | Adenocarcinoma | poorly | T2, N2, M1 |
| | | | | differentiated | |
| | | | | adenocarcinoma | |
| AC11 | Lung | NAT | | NAT | |
| AC39 | Lung | CAN | Adenocarcinoma | intermediate | T2, N2, Mx |
| | | | | grade | |
| | | | | adnocarcinoma | |
| AC39 | Lung | NAT | | NAT | |
| SQ80 | Lung | CAN | Squamous | poorly | T1, N1, M0 |
| | | | cell | differentiated | |
| | | | carcinoma | squamous cell | |
| | | | | carcinoma | |
| SQ80 | Lung | NAT | | NAT | |
| SQ81 | Lung | CAN | Squamous | poorly | T3, N1, Mx |
| | | | cell | differentiated | |
| | | | carcinoma | squamous | |
| | | | | carcinoma | |
| SQ81 | Lung | NAT | | NAT | |
| 19DN | Mammary | CAN | Invasive | Invasive ductal | G3, Stage |
| | | | ductal | carcinoma | IIA; T2N0M0 |
| | | | carcinoma | | |
| 19DN | Mammary | NAT | | NAT | |
| 42DN | Mammary | CAN | Invasive | Invasive Ductal | T3aN1M0 IIIA, |
| | | | ductal | Carcinoma | G3 |
| | | | carcinoma | | |
| 42DN | Mammary | NAT | | NAT | |
| 517 | Mammary | CAN | Infiltrating | Infiltrating | St. IIA, G3 |
| | | | ductal | ductal carcinoma | |
| | | | carcinoma | | |
| 517 | Mammary | NAT | | NAT | |
| 781M | Mammary | CAN | Invasive | | Architectural |
| | | | ductal | | grade- |
| | | | carcinoma | | 3/3, Nuclear |
| | | | | | grade-3/3 |
| 781M | Mammary | NAT | | NAT | |
| 869M | Mammary | CAN | Invasive | Invasive | Stage IIA |
| | | | carcinoma | Carcinoma | G1; T2NoMo |
| 869M | Mammary | NAT | | NAT | |
| 976M | Mammary | CAN | Invasive | Invasive Ductal | T2N1M0 (Stage |
| | | | ductal | Carcinoma | 2B Grade 2-3) |
| | | | carcinoma | | |
| 976M | Mammary | NAT | | NAT | |
| S570 | Mammary | CAN | Carcinoma | Carcinoma | Stage |
| | | | | | IIA; T1N1Mo |
| S570 | Mammary | NAT | | NAT | |
| S699 | Mammary | CAN | Invasive | Invasive Lobular | Stage IIB |
| | | | lobular | Carcinoma | G1; T2N1Mo |
| | | | carcinoma | | |
| S699 | Mammary | NAT | | NAT | |
| S997 | Mammary | CAN | Invasive | Invasive Ductal | Stage IIB G3; |
| | | | ductal | Carcinoma | T2N1Mo |
| | | | carcinoma | | |
| S997 | Mammary | NAT | | NAT | |
| G021 | Ovary | CAN | Carcinoma | St. IIIC, poorly | Stage—IIIC, |
| | | | | diff. | poorly diff. |
| G021 | Ovary | NAT | | NAT | |
| 1005O | Ovary | CAN | | papillary serous | 3 |
| | | | | and endometrioid | |
| | | | | ovarian | |
| | | | | carcinoma, | |
| | | | | concurrent | |
| | | | | metastatic | |
| | | | | breast cancer | |
| 1040O | Ovary | CAN | | papillary serous | |
| | | | | adeno, | |
| | | | | metastatic | |
| 105O | Ovary | CAN | | Papillary Serous | Stage IC G0; |
| | | | | Carcinoma with | T1cN0M0 |
| | | | | Focal Mucinous | |
| | | | | Differentiation | |
| 130X | Ovary | CAN | | Ovarian cancer | |
| 718O | Ovary | CAN | Adenocarcinoma | malignant tumor | IIIC |
| A1B | Ovary | CAN | Adenocarcinoma | CA | |
| 123O | Ovary | NRM | | Normal | |
| 18GA | Ovary | NRM | | NL | |
| 206I | Ovary | NRM | | NL | |
| 337O | Ovary | NRM | | Normal | |
| 40G | Ovary | NRM | | NL | |
| 515O | Ovary | NRM | | Normal | |
| C004 | Ovary | NRM | | NL | |
| C177 | Ovary | NRM | | several fluid | |
| | | | | filled cysts | |
| 71XL | Pancreas | CAN | | villous adenoma | localized |
| | | | | with paneth cell | |
| | | | | metaplasia | |
| 71XL | Pancreas | NAT | | NL | |
| 82XP | Pancreas | CAN | | serious | |
| | | | | cystadenoma | |
| 82XP | Pancreas | NAT | | NL | |
| 92X | Pancreas | CAN | Ductal | ductal | mod to |
| | | | adenocarcinoma | adenocarcinoma | focally |
| | | | | | poorly diff. |
| 92X | Pancreas | NAT | | NL | |
| 23B | Prostate | CAN | | Prostate tumor | Gleason's 3 + 4 |
| 23B | Prostate | NAT | | NAT | |
| 65XB | Prostate | CAN | Adenocarcinoma | adenocarcinom | 3 + 4 = 7 |
| 65XB | Prostate | NAT | | NL | |
| 675P | Prostate | CAN | Adenocarcinoma | adenocarcinoma | |
| 675P | Prostate | NAT | | Normal | |
| 84XB | Prostate | CAN | Adenocarcinoma | adenocarcinom | 2 + 3 |
| 84XB | Prostate | NAT | | NL | |
| 958P | Prostate | CAN | Adenocarcinoma | Adenocarcinoma | T2C, NO, MX |
| 958P | Prostate | NAT | NAT | Normal | |
| 263C | Prostate | BPH | | BPH | |
| 276P | Prostate | BPH | | BPH | |
| 767B | Prostate | BPH | | prostate BPH | |
| 855P | Prostate | BPH | | BPH | |
| 10R | Prostate | PROST | | active chronic | T0, N0, M0 |
| | | | | prostatitis | |
| 20R | Prostate | PROST | | PROSTATITIS | |
| 287S | Skin | CAN | Squamous | Invasive | Moderately |
| | | | cell | Keratinizing | Differentiated |
| | | | carcinoma | Squamous Cell | |
| | | | | Carcinoma | |
| 287S | Skin | NAT | | NAT | |
| 39A | Skin | CAN | | CA | St. II |
| 39A | Skin | NAT | | CA | St. II |
| 669S | Skin | CAN | Melanoma | Nodular | |
| | | | | malignant | |
| | | | | melanoma | |
| 669S | Skin | NAT | | NAT | |
| 171S | Small | CAN | Adenocarcinoma | Moderately | |
| | Intestine | | | differentiated | |
| | | | | Adenocarcinoma, | |
| | | | | invasive | |
| 171S | Small | NAT | | NAT | |
| | Intestine | | | | |
| 20SM | Small | CAN | Adenocarcinoma | Adenocarcinoma, | St. IV, |
| | Intestine | | | metastic to lung | poorly diff. |
| | | | | & liver | |
| 20SM | Small | NAT | | NAT | |
| | Intestine | | | | |
| H89 | Small | CAN | Adenocarcinoma | Adenocarcimoa | 80% tumor, |
| | Intestine | | | | 50% necrosis, |
| | | | | | moderately |
| | | | | | differentiated, |
| | | | | | G2-3; |
| | | | | | T3N1MX |
| H89 | Small | NAT | Adenocarcinoma | NAT | |
| | Intestine | | | | |
| 261S | Stomach | CAN | Signet-ring | Signet-ring cell | Stage IIIA, |
| | | | cell | carcinoma | T3N1M0 |
| | | | carcinoma | | |
| 261S | Stomach | NAT | | NAT | |
| 288S | Stomach | CAN | Adenocarcinoma | Infiltrating | Moderately |
| | | | | Adneocarcinoma | Differentiated |
| 288S | Stomach | NAT | | NAT | |
| AC93 or | Stomach | CAN | Adenocarcinoma | Adenocarcinoma | St. IV, G4, |
| 509L | | | | | T4N3M0, |
| | | | | | poorly diff. |
| AC93 or | Stomach | NAT | | NAT | |
| 509L | | | | | |
| 88S | Stomach | CAN | Adenocarcinoma | Mucinous | T3N1M0, St. |
| | | | | adenocarcinoma | IIIA |
| 88S | Stomach | NAT | | NAT | |
| 143N | Thyroid | CAN | Follicular | Follicular | |
| | Gland | | carcinoma | Carcinoma | |
| 143N | Thyroid | NAT | | NAT | |
| | Gland | | | | |
| 270T | Thyroid | CAN | | CA | |
| | Gland | | | | |
| 270T | Thyroid | NAT | | NAT | |
| | Gland | | | | |
| 56T | Thyroid | CAN | Papillary | Papillary | St. III; |
| | Gland | | carcinoma | Carcinoma | T4N1M0 |
| 56T | Thyroid | NAT | | NAT | |
| | Gland | | | | |
| 39X | Testes | CAN | | CA | |
| 39X | Testes | NAT | | NAT | |
| 647T | Testes | CAN | Teratocarcinoma | Teratocarcinoma | Stage IA |
| 647T | Testes | NAT | Teratocarcinoma | NAT | |
| 663T | Testes | CAN | Teratocarcinoma | Teratocarcinoma | |
| 663T | Testes | NAT | | NAT | |
| 135XO | Uterus | CAN | | Uterus normal | |
| 135XO | Uterus | NAT | | Uterus tumor | |
| 85XU | Uterus | CAN | | endometrial | I |
| | | | | carcinoma | |
| 85XU | Uterus | NAT | | NL | |
| B1 | Blood | NRM | | Normal | |
| B3 | Blood | NRM | | Normal | |
| B5 | Blood | NRM | | Normal | |
| B6 | Blood | NRM | | Normal | |
| B11 | Blood | NRM | | Normal | |
| 982B | Blood | NRM | | Normal | |
| 48AD | Adrenal | NRM | | Normal | |
| | Gland | | | | |
| 10BR | Brain | NRM | | Normal | |
| 01CL | Colon | NRM | | Normal | |
| 06CV | Cervix | NRM | | Normal | |
| 01ES | Esophagus | NRM | | Normal | |
| 46HR | Heart | NRM | | Normal | |
| 00HR | Human | CAN | CAN | Cancer pool | |
| | Reference | | | | |
| 55KD | Kidney | NRM | | Normal | |
| 89LV | Liver | NRM | | Normal | |
| 90LN | Lung | NRM | | Normal | |
| 01MA | Mammary | NRM | | Normal | |
| 84MU | Skeletal | NRM | | Normal | |
| | Muscle | | | | |
| 3APV | Ovary | NRM | | Normal | |
| 04PA | Pancreas | NRM | | Normal | |
| 59PL | Placenta | NRM | | Normal | |
| 09PR | Prostate | NRM | | Normal | |
| 21RC | Rectum | NRM | | Normal | |
| 59SM | Small | NRM | | Normal | |
| | Intestine | | | | |
| 7GSP | Spleen | NRM | | Normal | |
| 09ST | Stomach | NRM | | Normal | |
| 4GTS | Testes | NRM | | Normal | |
| 99TM | Thymus | NRM | | Normal | |
| | Gland | | | | |
| 16TR | Trachea | NRM | | Normal | |
| 57UT | Uterus | NRM | | Normal | |

DEX-0448 026.nt.1 (Cln259)

[0498] The relative expression level of Cln259 in various tissue samples is included below. Tissue samples include 78 pairs of matching samples, 7 non matched cancer samples, and 35 normal samples, all from various tissues annotated in the table. A matching pair is formed by mRNA from the cancer sample for a particular tissue and mRNA from the normal adjacent sample for that same tissue from the same individual. Of the normal samples 5 were blood samples which measured the expression levels in blood cells. Additionally, 2 prostatitis, and 4 Benign Prostatic Hyperplasia (BPH) samples are included. All the values are compared to normal colon sample CLN01CL (calibrator).

[0499] The table below contains the relative expression level values for the sample as compared to the calibrator. The table includes the Sample ID and expression level values for the following samples: Cancer (CAN), Normal Adjacent Tissue (NAT), Normal Tissue (NRM), Benign Prostatic Hyperplasia (BPH), and Prostatitis (PROST).

| Sample ID | CAN | NAT | NRM | BPH | PROST |
|---|---|---|---|---|---|
| CLNAS12 | 0.74 | 1.22 | | | |
| CLNAS46 | 1.13 | 1.92 | | | |
| CLNB34 | 0.29 | 0.38 | | | |
| CLNC9XR | 0.52 | 0.94 | | | |
| CLNCM67 | 0.98 | 0.97 | | | |
| CLNTX89 | 0.93 | 0.37 | | | |
| CLNAS43 | 7.88 | 1.10 | | | |
| CLNAS98 | 3.38 | 1.22 | | | |
| CLNRS53 | 0.33 | 0.82 | | | |
| CLNRC01 | 1.25 | 1.47 | | | |
| CLNSG27 | 1.12 | 2.04 | | | |
| CLNDC19 | 2.80 | 1.19 | | | |
| CLN401C | 1.18 | 1.64 | | | |
| CLNCM12 | 0.50 | 1.14 | | | |
| CLNTX01 | 1.31 | 3.49 | | | |
| BLD030B | 0.46 | 0.70 | | | |
| BLD520B | 2.07 | 0.26 | | | |
| BLDTR17 | 1.16 | 1.25 | | | |
| CVXKS52 | 4.74 | 1.34 | | | |
| CVXNK23 | 4.04 | 16.66 | | | |
| CVXNKS54 | 2.96 | 0.81 | | | |
| CVXNKS55 | 2.63 | 5.01 | | | |
| CVXNKS81 | 6.61 | 12.74 | | | |
| ENDO10479 | 6.39 | 1.17 | | | |
| ENDO28XA | 2.85 | 6.33 | | | |
| ENDO8XA | 1.44 | 0.47 | | | |
| KID106XD | 0.87 | 0.46 | | | |
| KID107XD | 1.42 | 0.91 | | | |
| KID109XD | 1.15 | 0.85 | | | |
| KID10XD | 0.45 | 0.12 | | | |
| KID22K | 0.80 | 0.28 | | | |
| LNG205L | 2.21 | 1.94 | | | |
| LNG315L | 1.87 | 1.88 | | | |
| LNG507L | 2.04 | 2.43 | | | |
| LNG528L | 4.22 | 1.49 | | | |
| LNG8837L | 1.89 | 2.24 | | | |
| LNGAC11 | 2.36 | 2.71 | | | |
| LNGAC39 | 4.81 | 1.51 | | | |
| LNGSQ80 | 1.23 | 1.59 | | | |
| LNGSQ81 | 4.06 | 2.94 | | | |
| LVR15XA | 1.10 | 1.05 | | | |
| LVR174L | 1.38 | 2.97 | | | |
| LVR187L | 3.46 | 2.44 | | | |
| MAM19DN | 2.90 | 2.01 | | | |
| MAM42DN | 4.40 | 2.31 | | | |
| MAM517 | 13.65 | 2.05 | | | |
| MAM781M | 1.62 | 0.39 | | | |
| MAM869M | 30.36 | 0.86 | | | |
| MAM976M | 3.23 | 1.06 | | | |
| MAMS570 | 1.53 | 3.30 | | | |
| MAMS699 | 0.50 | 1.44 | | | |
| MAMS997 | 3.39 | 1.32 | | | |
| OVRG021 | 1.48 | 0.47 | | | |
| OVR1005O | 5.96 | | | | |
| OVR1040O | 11.10 | | | | |
| OVR105O | 1.58 | | | | |
| OVR130X | 17.74 | | | | |
| OVR718O | 3.55 | | | | |
| OVRA1B | 4.85 | | | | |
| OVR123O | | | 0.52 | | |
| OVR18GA | | | 0.30 | | |
| OVR206I | | | 0.26 | | |
| OVR337O | | | 0.00 | | |
| OVR40G | | | 0.39 | | |
| OVR515O | | | 0.32 | | |
| OVRC004 | | | 3.88 | | |
| OVRC177 | | | 0.48 | | |
| PAN71XL | 1.22 | 0.46 | | | |
| PAN82XP | 1.00 | 1.32 | | | |
| PAN92X | 9.27 | 0.85 | | | |
| PRO23B | 1.62 | 2.06 | | | |
| PRO65XB | 0.65 | 1.30 | | | |
| PRO675P | 2.12 | 1.79 | | | |
| PRO84XB | 1.38 | 1.64 | | | |
| PRO958P | 1.80 | 1.03 | | | |
| PRO263C | | | | 1.38 | |
| PRO276P | | | | 1.12 | |
| PRO767B | | | | 1.88 | |
| PRO855P | | | | 1.40 | |
| PRO10R | | | | | 0.87 |
| PRO20R | | | | | 0.75 |
| SKN287S | 1.13 | 1.47 | | | |
| SKN39A | 0.22 | 0.62 | | | |
| SKN669S | 0.41 | 1.28 | | | |
| SMINT171S | 2.91 | 1.41 | | | |
| SMINT20SM | 4.90 | 2.06 | | | |
| SMINTH89 | 0.99 | 1.26 | | | |
| STO261S | 4.23 | 1.20 | | | |
| STO288S | 1.07 | 1.22 | | | |
| STO88S | 2.78 | 1.17 | | | |
| THRD143N | 0.93 | 1.37 | | | |
| THRD270T | 2.11 | 2.42 | | | |
| THRD56T | 4.34 | 1.52 | | | |
| TST39X | 2.50 | 2.82 | | | |
| TST647T | 4.81 | 2.35 | | | |
| TST663T | 4.19 | 3.04 | | | |
| UTR135XO | 1.14 | 1.18 | | | |
| UTR85XU | 3.40 | 1.57 | | | |
| BLOB1 | | | 0.00 | | |
| BLOB3 | | | 0.63 | | |
| BLOB6 | | | 0.55 | | |
| BLOB11 | | | 0.58 | | |
| BLO982B | | | 0.00 | | |
| ADR48AD | | | 0.90 | | |
| HUMREF00HR | 1.14 | | | | |
| BRN10BR | | | 0.10 | | |
| CLN01CL | | | 1.00 | | |
| ESO01ES | | | 0.73 | | |
| HRT46HR | | | 0.02 | | |
| KID55KD | | | 0.12 | | |
| LVR89LV | | | 3.12 | | |
| LNG90LN | | | 1.69 | | |
| MAM01MA | | | 0.53 | | |
| MSL84MU | | | 0.02 | | |
| OVR3APV | | | 0.48 | | |
| PAN04PA | | | 0.75 | | |
| PLA59PL | | | 1.66 | | |
| PRO09PR | | | 0.87 | | |
| REC21RC | | | 4.63 | | |
| SMINT59SM | | | 0.30 | | |
| SPL7GSP | | | 0.90 | | |
| STO09ST | | | 1.59 | | |
| THYM99TM | | | 0.20 | | |
| TRA16TR | | | 1.12 | | |
| TST4GTS | | | 2.95 | | |
| UTR57UT | | | 0.77 | | |

0.00 = Negative or Not Detected

[0500] The sensitivity for Cln259 expression was calculated for the cancer samples versus normal samples. The sensitivity value indicates the percentage of cancer samples that show levels of Cln259 at least 2 fold higher than the normal tissue or the corresponding normal adjacent form the same patient.

[0501] This specificity is an indication of the level of colon tissue specific expression of the transcript compared to all the other tissue types tested in our assay. Thus, these experiments indicate Cln259 being useful as an colon cancer diagnostic marker and/or therapeutic target.

[0502] Sensitivity and specificity data is reported in the table below.

| | CLN | LNG | MAM | OVR | PRO |
|---|---|---|---|---|---|
| Sensitivity, Up vs. NAT | 27% | 22% | 56% | 0% | 0% |
| Sensitivity, Down vs. | 20% | 0% | 22% | 0% | 20% |
| NAT | | | | | |
| Sensitivity, Up vs. NRM | 20% | 33% | 89% | 100% | 40% |
| Sensitivity, Down vs. | 20% | 0% | 0% | 0% | 0% |
| NRM | | | | | |
| Specificity | 3.47% | 5.41% | 9.19% | 12.3% | 4.28% |

[0503] Altogether, the tissue specificity, plus the mRNA differential expression in the samples tested are believed to make Cln259 a good marker for diagnosing, monitoring, staging, imaging and treating colon cancer.

[0504] Additionally, the the tissue specificity, plus the mRNA differential expression in the samples tested are believed to make Cln259 a good marker for diagnosing, monitoring, staging, imaging and treating ovarian cancer and/or breast cancer.

[0505] Primers used for QPCR Expression Analysis of Cln259 are as follows:

| | |
|---|---|
| (Cln259_forward): | |
| TACGCAGAGCTCATCGTCCTT | (SEQ ID NO: 238) |
| (Cln259_reverse): | |
| ACAACCACGAAGAGCCAGTCTT | (SEQ ID NO: 239) |
| (Cln259_probe): | |
| TGGCTGAGCTCTTACCTGGTTTTCAGGC | (SEQ ID NO: 240) |

Conclusions

[0506] Altogether, the high level of tissue specificity, plus the mRNA overexpression in matched samples tested are indicative of SEQ ID NO: 1-95 being a diagnostic marker and/or a therapeutic target for cancer.

### Example 3

### Protein Expression

[0507] The CSNA is amplified by polymerase chain reaction (PCR) and the amplified DNA fragment encoding the CSNA is subcloned in pET-21d for expression in E. coli. In addition to the CSNA coding sequence, codons for two amino acids, Met-Ala, flanking the NH₂-terminus of the coding sequence of CSNA, and six histidines, flanking the COOH-terminus of the coding sequence of CSNA, are incorporated to serve as initiating Met/restriction site and purification tag, respectively.

[0508] An over-expressed protein band of the appropriate molecular weight may be observed on a Coomassie blue stained polyacrylamide gel. This protein band is confirmed by Western blot analysis using monoclonal antibody against 6× Histidine tag.

[0509] Large-scale purification of CSP is achieved using cell paste generated from 6-liter bacterial cultures, and purified using immobilized metal affinity chromatography (IMAC). Soluble fractions that are separated from total cell lysate were incubated with a nickel chelating resin. The column is packed and washed with five column volumes of wash buffer. CSP is eluted stepwise with various concentration imidazole buffers.

### Example 4

### Fusion Proteins

[0510] The human Fc portion of the IgG molecule can be PCR amplified, using primers that span the 5′and 3′ ends of the sequence described below. These primers also should have convenient restriction enzyme sites that will facilitate cloning into an expression vector, preferably a mammalian expression vector. For example, if pC4 (Accession No. 209646) is used, the human Fc portion can be ligated into the BamHI cloning site. Note that the 3′ BamHI site should be destroyed. Next, the vector containing the human Fc portion is re-restricted with BamHI, linearizing the vector, and a polynucleotide of the present invention, isolated by the PCR protocol described in Example 2, is ligated into this BamHI site. Note that the polynucleotide is cloned without a stop codon, otherwise a fusion protein will not be produced. If the naturally occurring signal sequence is used to produce the secreted protein, pC4 does not need a second signal peptide. Alternatively, if the naturally occurring signal sequence is not used, the vector can be modified to include a heterologous signal sequence. See, e.g., WO 96/34891.

### Example 5

### Production of an Antibody from a Polypeptide

[0511] In general, such procedures involve immunizing an animal (preferably a mouse) with polypeptide or, more preferably, with a secreted polypeptide-expressing cell. Such cells may be cultured in any suitable tissue culture medium; however, it is preferable to culture cells in Earle's modified Eagle's medium supplemented with 10% fetal bovine serum (inactivated at about 56° C.), and supplemented with about 10 g/l of nonessential amino acids, about 1,000 U/ml of penicillin, and about 100, μg/ml of streptomycin. The splenocytes of such mice are extracted and fused with a suitable myeloma cell line. Any suitable myeloma cell line may be employed in accordance with the present invention; however, it is preferable to employ the parent myeloma cell line (SP20), available from the ATCC. After fusion, the resulting hybridoma cells are selectively maintained in HAT medium, and then cloned by limiting dilution as described by Wands et al., Gastroenterology 80: 225-232 (1981).

[0512] The hybridoma cells obtained through such a selection are then assayed to identify clones which secrete antibodies capable of binding the polypeptide. Alternatively, additional antibodies capable of binding to the polypeptide can be produced in a two-step procedure using anti-idiotypic antibodies. Such a method makes use of the fact that antibodies are themselves antigens, and therefore, it is possible to obtain an antibody which binds to a second antibody. In accordance with this method, protein specific antibodies are used to immunize an animal, preferably a mouse. The splenocytes of such an animal are then used to produce hybridoma cells, and the hybridoma cells are screened to identify clones which produce an antibody whose ability to bind to the protein-specific antibody can be blocked by the polypeptide. Such antibodies comprise anti-idiotypic antibodies to the protein specific antibody and can be used to immunize an animal to induce formation of further protein-specific antibodies.

### Example 6

### Method of Determining Alterations in a Gene Corresponding to a Polynucleotide

[0513] RNA is isolated from individual patients or from a family of individuals that have a phenotype of interest. cDNA is then generated from these RNA samples using protocols known in the art. See, Sambrook (2001), supra. The cDNA is then used as a template for PCR, employing primers surrounding regions of interest in SEQ ID NO: 1-95. Suggested PCR conditions consist of 35 cycles at 95° C. for 30 seconds; 60-120 seconds at 52-58° C.; and 60-120 seconds at 70° C., using buffer solutions described in Sidransky et al., Science 252(5006): 706-9 (1991). See also Sidransky et al., Science 278(5340): 1054-9 (1997).

[0514] PCR products are then sequenced using primers labeled at their 5′ end with T4 polynucleotide kinase, employing SequiTherm Polymerase. (Epicentre Technologies). The intron-exon borders of selected exons are also determined and genomic PCR products analyzed to confirm the results. PCR products harboring suspected mutations are then cloned and sequenced to validate the results of the direct sequencing. PCR products is cloned into T-tailed vectors as described in Holton et al., Nucleic Acids Res., 19: 1156 (1991) and sequenced with T7 polymerase (United States Biochemical). Affected individuals are identified by mutations not present in unaffected individuals.

[0515] Genomic rearrangements may also be determined. Genomic clones are nick-translated with digoxigenin deoxyuridine 5′ triphosphate (Boehringer Manheim), and FISH is performed as described in Johnson et al., Methods Cell Biol. 35: 73-99 (1991). Hybridization with the labeled probe is carried out using a vast excess of human cot-1 DNA for specific hybridization to the corresponding genomic locus.

[0516] Chromosomes are counterstained with 4,6-diamino-2-phenylidole and propidium iodide, producing a combination of C-and R-bands. Aligned images for precise mapping are obtained using a triple-band filter set (Chroma Technology, Brattleboro, Vt.) in combination with a cooled charge-coupled device camera (Photometrics, Tucson, Ariz.) and variable excitation wavelength filters. Johnson (1991). Image collection, analysis and chromosomal fractional length measurements are performed using the ISee Graphical Program System. (Inovision Corporation, Durham, N.C.) Chromosome alterations of the genomic region hybridized by the probe are identified as insertions, deletions, and translocations. These alterations are used as a diagnostic marker for an associated disease.

### Example 7

### Method of Detecting Abnormal Levels of a Polypeptide in a Biological Sample

[0517] Antibody-sandwich ELISAs are used to detect polypeptides in a sample, preferably a biological sample. Wells of a microtiter plate are coated with specific antibodies, at a final concentration of 0.2 to 10 ug/ml. The antibodies are either monoclonal or polyclonal and are produced by the method described above. The wells are blocked so that non-specific binding of the polypeptide to the well is reduced. The coated wells are then incubated for >2 hours at RT with a sample containing the polypeptide. Preferably, serial dilutions of the sample should be used to validate results. The plates are then washed three times with deionized or distilled water to remove unbound polypeptide. Next, 50 μl of specific antibody-alkaline phosphatase conjugate, at a concentration of 25-400 ng, is added and incubated for 2 hours at room temperature. The plates are again washed three times with deionized or distilled water to remove unbound conjugate. 75 μl of 4-methylumbelliferyl phosphate (MUP) or p-nitrophenyl phosphate (NPP) substrate solution are added to each well and incubated 1 hour at room temperature.

[0518] The reaction is measured by a microtiter plate reader. A standard curve is prepared, using serial dilutions of a control sample, and polypeptide concentrations are plotted on the X-axis (log scale) and fluorescence or absorbance on the Y-axis (linear scale). The concentration of the polypeptide in the sample is calculated using the standard curve.

### Example 8

### Formulating a Polypeptide

[0519] The secreted polypeptide composition will be formulated and dosed in a fashion consistent with good medical practice, taking into account the clinical condition of the individual patient (especially the side effects of treatment with the secreted polypeptide alone), the site of delivery, the method of administration, the scheduling of administration, and other factors known to practitioners. The “effective amount” for purposes herein is thus determined by such considerations.

[0520] As a general proposition, the total pharmaceutically effective amount of secreted polypeptide administered parenterally per dose will be in the range of about 1, μg/kg/day to 10 mg/kg/day of patient body weight, although, as noted above, this will be subject to therapeutic discretion. More preferably, this dose is at least 0.01 mg/kg/day, and most preferably for humans between about 0.01 and 1 mg/kg/day for the hormone. If given continuously, the secreted polypeptide is typically administered at a dose rate of about 1 μg/kg/hour to about 50 mg/kg/hour, either by 1-4 injections per day or by continuous subcutaneous infusions, for example, using a mini-pump. An intravenous bag solution may also be employed. The length of treatment needed to observe changes and the interval following treatment for responses to occur appears to vary depending on the desired effect.

[0521] Pharmaceutical compositions containing the secreted protein of the invention are administered orally, rectally, parenterally, intracisternally, intravaginally, intraperitoneally, topically (as by powders, ointments, gels, drops or transdermal patch), bucally, or as an oral or nasal spray. “Pharmaceutically acceptable carrier” refers to a non-toxic solid, semisolid or liquid filler, diluent, encapsulating material or formulation auxiliary of any type. The term “parenteral” as used herein refers to modes of administration which include intravenous, intramuscular, intraperitoneal, intrasternal, subcutaneous and intraarticular injection and infusion.

[0522] The secreted polypeptide is also suitably administered by sustained-release systems. Suitable examples of sustained-release compositions include semipermeable polymer matrices in the form of shaped articles, e.g., films, or microcapsules. Sustained-release matrices include polylactides (U.S. Pat. No. 3,773,919, EP 58,481, the contents of which are hereby incorporated by reference herein in their entirety), copolymers of L-glutamic acid and gamma-ethyl-L-glutamate (Sidman, U. et al., Biopolymers 22: 547-556 (1983)), poly (2-hydroxyethyl methacrylate) (R. Langer et al., J. Biomed. Mater. Res. 15: 167-277 (1981), and R. Langer, Chem. Tech. 12: 98-105 (1982)), ethylene vinyl acetate (R. Langer et al.) or poly-D-(−)-3-hydroxybutyric acid (EP 133,988). Sustained-release compositions also include liposomally entrapped polypeptides. Liposomes containing the secreted polypeptide are prepared by methods known per se: D E Epstein et al., Proc. Natl. Acad. Sci. USA 82: 3688-3692 (1985); Hwang et al., Proc. Natl. Acad. Sci. USA 77: 4030-4034 (1980); EP 52,322; EP 36,676; EP 88,046; EP 143,949; EP 142,641; Japanese Pat. Appl. 83-118008; U.S. Pat. Nos. 4,485,045 and 4,544,545; and EP 102,324, the contents of which are hereby incorporated by reference herein in their entirety. Ordinarily, the liposomes are of the small (about 200-800 Angstroms) unilamellar type in which the lipid content is greater than about 30 mol. percent cholesterol, the selected proportion being adjusted for the optimal secreted polypeptide therapy.

[0523] For parenteral administration, in one embodiment, the secreted polypeptide is formulated generally by mixing it at the desired degree of purity, in a unit dosage injectable form (solution, suspension, or emulsion), with a pharmaceutically acceptable carrier, i.e., one that is non-toxic to recipients at the dosages and concentrations employed and is compatible with other ingredients of the formulation.

[0524] For example, the formulation preferably does not include oxidizing agents and other compounds that are known to be deleterious to polypeptides. Generally, the formulations are prepared by contacting the polypeptide uniformly and intimately with liquid carriers or finely divided solid carriers or both. Then, if necessary, the product is shaped into the desired formulation. Preferably, the carrier is a parenteral carrier, more preferably, a solution that is isotonic with the blood of the recipient. Examples of such carrier vehicles include water, saline, Ringer's solution, and dextrose solution. Non-aqueous vehicles such as fixed oils and ethyl oleate are also useful herein, as well as liposomes.

[0525] The carrier suitably contains minor amounts of additives such as substances that enhance isotonicity and chemical stability. Such materials are non-toxic to recipients at the dosages and concentrations employed, and include buffers such as phosphate, citrate, succinate, acetic acid, and other organic acids or their salts; antioxidants such as ascorbic acid; low molecular weight (less than about ten residues) polypeptides, e.g., polyarginine or tripeptides; proteins, such as serum albumin, gelatin, or immunoglobulins; hydrophilic polymers such as polyvinylpyrrolidone; amino acids, such as glycine, glutamic acid, aspartic acid, or arginine; monosaccharides, disaccharides, and other carbohydrates including cellulose or its derivatives, glucose, manose, or dextrins; chelating agents such as EDTA; sugar alcohols such as mannitol or sorbitol; counterions such as sodium; and/or nonionic surfactants such as polysorbates, poloxamers, or PEG.

[0526] The secreted polypeptide is typically formulated in such vehicles at a concentration of about 0.1 mg/ml to 100 mg/ml, preferably 1-10 mg/ml, at a pH of about 3 to 8. It will be understood that the use of certain of the foregoing excipients, carriers, or stabilizers will result in the formation of polypeptide salts.

[0527] Any polypeptide to be used for therapeutic administration can be sterile. Sterility is readily accomplished by filtration through sterile filtration membranes (e.g., 0.2 micron membranes). Therapeutic polypeptide compositions generally are placed into a container having a sterile access port, for example, an intravenous solution bag or vial having a stopper pierceable by a hypodermic injection needle.

[0528] Polypeptides ordinarily will be stored in unit or multi-dose containers, for example, sealed ampules or vials, as an aqueous solution or as a lyophilized formulation for reconstitution. As an example of a lyophilized formulation, 10-ml vials are filled with 5 ml of sterile-filtered 1% (w/v) aqueous polypeptide solution, and the resulting mixture is lyophilized. The infusion solution is prepared by reconstituting the lyophilized polypeptide using bacteriostatic Water-for-Injection.

[0529] The invention also provides a pharmaceutical pack or kit comprising one or more containers filled with one or more of the ingredients of the pharmaceutical compositions of the invention. Associated with such container(s) can be a notice in the form prescribed by a governmental agency regulating the manufacture, use or sale of pharmaceuticals or biological products, which notice reflects approval by the agency of manufacture, use or sale for human administration. In addition, the polypeptides of the present invention may be employed in conjunction with other therapeutic compounds.

### Example 9

### Method of Treating Decreased Levels of the Polypeptide

[0530] It will be appreciated that conditions caused by a decrease in the standard or normal expression level of a secreted protein in an individual can be treated by administering the polypeptide of the present invention, preferably in the secreted form. Thus, the invention also provides a method of treatment of an individual in need of an increased level of the polypeptide comprising administering to such an individual a pharmaceutical composition comprising an amount of the polypeptide to increase the activity level of the polypeptide in such an individual.

[0531] For example, a patient with decreased levels of a polypeptide receives a daily dose 0.1-100 ug/kg of the polypeptide for six consecutive days. Preferably, the polypeptide is in the secreted form. The exact details of the dosing scheme, based on administration and formulation, are provided above.

### Example 10

### Method of Treating Increased Levels of the Polypeptide

[0532] Antisense or RNAi technology are used to inhibit production of a polypeptide of the present invention. This technology is one example of a method of decreasing levels of a polypeptide, preferably a secreted form, due to a variety of etiologies, such as cancer.

[0533] For example, a patient diagnosed with abnormally increased levels of a polypeptide is administered intravenously antisense polynucleotides at 0.5, 1.0, 1.5, 2.0 and 3.0 mg/kg day for 21 days. This treatment is repeated after a 7-day rest period if the treatment was well tolerated. The formulation of the antisense polynucleotide is provided above.

### Example 11

### Method of Treatment Using Gene Therapy

[0534] One method of gene therapy transplants fibroblasts, which are capable of expressing a polypeptide, onto a patient. Generally, fibroblasts are obtained from a subject by skin biopsy. The resulting tissue is placed in tissue-culture medium and separated into small pieces. Small chunks of the tissue are placed on a wet surface of a tissue culture flask, approximately ten pieces are placed in each flask. The flask is turned upside down, closed tight and left at room temperature over night. After 24 hours at room temperature, the flask is inverted and the chunks of tissue remain fixed to the bottom of the flask and fresh media (e.g., Ham's F12 media, with 10% FBS, penicillin and streptomycin) is added. The flasks are then incubated at 37° C. for approximately one week.

[0535] At this time, fresh media is added and subsequently changed every several days. After an additional two weeks in culture, a monolayer of fibroblasts emerge. The monolayer is trypsinized and scaled into larger flasks. pMV-7 (Kirschmeier, P. T. et al., DNA, 7: 219-25 (1988)), flanked by the long terminal repeats of the Moloney murine sarcoma virus, is digested with EcoRI and HindIII and subsequently treated with calf intestinal phosphatase. The linear vector is fractionated on agarose gel and purified, using glass beads.

[0536] The cDNA encoding a polypeptide of the present invention can be amplified using PCR primers which correspond to the 5′and 3′end sequences respectively as set forth in Example 3. Preferably, the 5′primer contains an EcoRI site and the 3′primer includes a HindIII site. Equal quantities of the Moloney murine sarcoma virus linear backbone and the amplified EcoRI and HindIII fragment are added together, in the presence of T4 DNA ligase. The resulting mixture is maintained under conditions appropriate for ligation of the two fragments. The ligation mixture is then used to transform bacteria HB 101, which are then plated onto agar containing kanamycin for the purpose of confirming that the vector has the gene of interest properly inserted.

[0537] The amphotropic pA317 or GP+aml2 packaging cells are grown in tissue culture to confluent density in Dulbecco's Modified Eagles Medium (DMEM) with 10% calf serum (CS), penicillin and streptomycin. The MSV vector containing the gene is then added to the media and the packaging cells transduced with the vector. The packaging cells now produce infectious viral particles containing the gene (the packaging cells are now referred to as producer cells).

[0538] Fresh media is added to the transduced producer cells, and subsequently, the media is harvested from a 10 cm plate of confluent producer cells. The spent media, containing the infectious viral particles, is filtered through a millipore filter to remove detached producer cells and this media is then used to infect fibroblast cells. Media is removed from a sub-confluent plate of fibroblasts and quickly replaced with the media from the producer cells. This media is removed and replaced with fresh media.

[0539] If the titer of virus is high, then virtually all fibroblasts will be infected and no selection is required. If the titer is very low, then it is necessary to use a retroviral vector that has a selectable marker, such as neo or his. Once the fibroblasts have been efficiently infected, the fibroblasts are analyzed to determine whether protein is produced.

[0540] The engineered fibroblasts are then transplanted onto the host, either alone or after having been grown to confluence on cytodex 3 microcarrier beads.

### Example 12

### Method of Treatment Using Gene Therapy-In Vivo

[0541] Another aspect of the present invention is using in vivo gene therapy methods to treat disorders, diseases and conditions. The gene therapy method relates to the introduction of naked nucleic acid (DNA, RNA, and antisense DNA or RNA) sequences into an animal to increase or decrease the expression of the polypeptide.

[0542] The polynucleotide of the present invention may be operatively linked to a promoter or any other genetic elements necessary for the expression of the polypeptide by the target tissue. Such gene therapy and delivery techniques and methods are known in the art, see, for example, Tabata H. et al. Cardiovasc. Res. 35 (3): 470-479 (1997); Chao J et al. Pharmacol. Res. 35 (6): 517-522 (1997); Wolff J. A. Neuromuscul Disord. 7 (5): 314-318 (1997), Schwartz B. et al. Gene Ther. 3 (5): 405-411 (1996); and Tsurumi Y. et al. Circulation 94 (12): 3281-3290 (1996); W0 90/11092, W0 98/11779; U.S. Pat. Nos. 5,693,622; 5,705,151; 5,580,859, the contents of which are hereby incorporated by reference herein in their entirety.

[0543] The polynucleotide constructs may be delivered by any method that delivers injectable materials to the cells of an animal, such as, injection into the interstitial space of tissues (heart, muscle, skin, colon, liver, intestine and the like). The polynucleotide constructs can be delivered in a pharmaceutically acceptable liquid or aqueous carrier.

[0544] The term “naked” polynucleotide, DNA or RNA, refers to sequences that are free from any delivery vehicle that acts to assist, promote, or facilitate entry into the cell, including viral sequences, viral particles, liposome formulations, lipofectin or precipitating agents and the like. However, the polynucleotides of the present invention may also be delivered in liposome formulations (such as those taught in Felgner P. L. et al. Ann. NY Acad. Sci. 772: 126-139 (1995) and Abdallah B. et al. Biol. Cell 85 (1): 1-7 (1995)) which can be prepared by methods well known to those skilled in the art.

[0545] The polynucleotide vector constructs used in the gene therapy method are preferably constructs that will not integrate into the host genome nor will they contain sequences that allow for replication. Any strong promoter known to those skilled in the art can be used for driving the expression of DNA. Unlike other gene therapies techniques, one major advantage of introducing naked nucleic acid sequences into target cells is the transitory nature of the polynucleotide synthesis in the cells. Studies have shown that non-replicating DNA sequences can be introduced into cells to provide production of the desired polypeptide for periods of up to six months.

[0546] The polynucleotide construct can be delivered to the interstitial space of tissues within the an animal, including of muscle, skin, brain, colon, liver, spleen, bone marrow, thymus, heart, lymph, blood, bone, cartilage, pancreas, kidney, gall bladder, stomach, intestine, testis, ovary, uterus, rectum, nervous system, eye, gland, and connective tissue. Interstitial space of the tissues comprises the intercellular fluid, mucopolysaccharide matrix among the reticular fibers of organ tissues, elastic fibers in the walls of vessels or chambers, collagen fibers of fibrous tissues, or that same matrix within connective tissue ensheathing muscle cells or in the lacunae of bone. It is similarly the space occupied by the plasma of the circulation and the lymph fluid of the lymphatic channels. Delivery to the interstitial space of muscle tissue is preferred for the reasons discussed below. They may be conveniently delivered by injection into the tissues comprising these cells. They are preferably delivered to and expressed in persistent, non-dividing cells which are differentiated, although delivery and expression may be achieved in non-differentiated or less completely differentiated cells, such as, for example, stem cells of blood or skin fibroblasts. In vivo muscle cells are particularly competent in their ability to take up and express polynucleotides.

[0547] For the naked polynucleotide injection, an effective dosage amount of DNA or RNA will be in the range of from about 0.05 μg/kg body weight to about 50 mg/kg body weight. Preferably the dosage will be from about 0.005 mg/kg to about 20 mg/kg and more preferably from about 0.05 mg/kg to about 5 mg/kg. Of course, as the artisan of ordinary skill will appreciate, this dosage will vary according to the tissue site of injection. The appropriate and effective dosage of nucleic acid sequence can readily be determined by those of ordinary skill in the art and may depend on the condition being treated and the route of administration. The preferred route of administration is by the parenteral route of injection into the interstitial space of tissues. However, other parenteral routes may also be used, such as, inhalation of an aerosol formulation particularly for delivery to colons or bronchial tissues, throat or mucous membranes of the nose. In addition, naked polynucleotide constructs can be delivered to arteries during angioplasty by the catheter used in the procedure.

[0548] The dose response effects of injected polynucleotide in muscle in vivo is determined as follows. Suitable template DNA for production of mRNA coding for polypeptide of the present invention is prepared in accordance with a standard recombinant DNA methodology. The template DNA, which may be either circular or linear, is either used as naked DNA or complexed with liposomes. The quadriceps muscles of mice are then injected with various amounts of the template DNA.

[0549] Five to six week old female and male Balb/C mice are anesthetized by intraperitoneal injection with 0.3 ml of 2.5% Avertin. A 1.5 cm incision is made on the anterior thigh, and the quadriceps muscle is directly visualized. The template DNA is injected in 0.1 ml of carrier in a 1 cc syringe through a 27 gauge needle over one minute, approximately 0.5 cm from the distal insertion site of the muscle into the knee and about 0.2 cm deep. A suture is placed over the injection site for future localization, and the skin is closed with stainless steel clips.

[0550] After an appropriate incubation time (e.g., 7 days) muscle extracts are prepared by excising the entire quadriceps. Every fifth 15 um cross-section of the individual quadriceps muscles is histochemically stained for protein expression. A time course for protein expression may be done in a similar fashion except that quadriceps from different mice are harvested at different times. Persistence of DNA in muscle following injection may be determined by Southern blot analysis after preparing total cellular DNA and HIRT supernatants from injected and control mice.

[0551] The results of the above experimentation in mice can be use to extrapolate proper dosages and other treatment parameters in humans and other animals using naked DNA.

### Example 13

### Transgenic Animals

[0552] The polypeptides of the invention can also be expressed in transgenic animals. Animals of any species, including, but not limited to, mice, rats, rabbits, hamsters, guinea pigs, pigs, micro-pigs, goats, sheep, cows and non-human primates, e.g., baboons, monkeys, and chimpanzees may be used to generate transgenic animals. In a specific embodiment, techniques described herein or otherwise known in the art, are used to express polypeptides of the invention in humans, as part of a gene therapy protocol.

[0553] Any technique known in the art may be used to introduce the transgene (I.e., polynucleotides of the invention) into animals to produce the founder lines of transgenic animals. Such techniques include, but are not limited to, pronuclear microinjection (Paterson et al., Appl. Microbiol. Biotechnol. 40: 691-698 (1994); Carver et al., Biotechnology 11: 1263-1270 (1993); Wright et al., Biotechnology 9: 830-834 (1991); and U.S. Pat. No. 4,873,191, the contents of which is hereby incorporated by reference herein in its entirety); retrovirus mediated gene transfer into germ lines (Van der Putten et al., Proc. Natl. Acad. Sci., USA 82: 6148-6152 (1985)), blastocysts or embryos; gene targeting in embryonic stem cells (Thompson et al., Cell 56: 313-321 (1989)); electroporation of cells or embryos (Lo, 1983, Mol Cell. Biol. 3: 1803-1814 (1983)); introduction of the polynucleotides of the invention using a gene gun (see, e.g., Ulmer et al., Science 259: 1745 (1993); introducing nucleic acid constructs into embryonic pleuripotent stem cells and transferring the stem cells back into the blastocyst; and sperm mediated gene transfer (Lavitrano et al., Cell 57: 717-723 (1989). For a review of such techniques, see Gordon, “Transgenic Animals,” Intl. Rev. Cytol. 115: 171-229 (1989).

[0554] Any technique known in the art may be used to produce transgenic clones containing polynucleotides of the invention, for example, nuclear transfer into enucleated oocytes of nuclei from cultured embryonic, fetal, or adult cells induced to quiescence (Campell et al., Nature 380: 64-66 (1996); Wilmut et al., Nature 385: 810813 (1997)).

[0555] The present invention provides for transgenic animals that carry the transgene in all their cells, as well as animals which carry the transgene in some, but not all their cells, I.e., mosaic animals or chimeric. The transgene may be integrated as a single transgene or as multiple copies such as in concatamers, e.g., head-to-head tandems or head-to-tail tandems. The transgene may also be selectively introduced into and activated in a particular cell type by following, for example, the teaching of Lasko et al. (Lasko et al., Proc. Natl. Acad. Sci. USA 89: 6232-6236 (1992)). The regulatory sequences required for such a cell-type specific activation will depend upon the particular cell type of interest, and will be apparent to those of skill in the art. When it is desired that the polynucleotide transgene be integrated into the chromosomal site of the endogenous gene, gene targeting is preferred. Briefly, when such a technique is to be utilized, vectors containing some nucleotide sequences homologous to the endogenous gene are designed for the purpose of integrating, via homologous recombination with chromosomal sequences, into and disrupting the function of the nucleotide sequence of the endogenous gene. The transgene may also be selectively introduced into a particular cell type, thus inactivating the endogenous gene in only that cell type, by following, for example, the teaching of Gu et al. (Gu et al., Science 265: 103-106 (1994)). The regulatory sequences required for such a cell-type specific inactivation will depend upon the particular cell type of interest, and will be apparent to those of skill in the art.

[0556] Once transgenic animals have been generated, the expression of the recombinant gene may be assayed utilizing standard techniques. Initial screening may be accomplished by Southern blot analysis or PCR techniques to analyze animal tissues to verify that integration of the transgene has taken place. The level of mRNA expression of the transgene in the tissues of the transgenic animals may also be assessed using techniques which include, but are not limited to, Northern blot analysis of tissue samples obtained from the animal, in situ hybridization analysis, and reverse transcriptase-PCR (rt-PCR). Samples of transgenic gene-expressing tissue may also be evaluated immunocytochemically or immunohistochemically using antibodies specific for the transgene product.

[0557] Once the founder animals are produced, they may be bred, inbred, outbred, or crossbred to produce colonies of the particular animal. Examples of such breeding strategies include, but are not limited to: outbreeding of founder animals with more than one integration site in order to establish separate lines; inbreeding of separate lines in order to produce compound transgenics that express the transgene at higher levels because of the effects of additive expression of each transgene; crossing of heterozygous transgenic animals to produce animals homozygous for a given integration site in order to both augment expression and eliminate the need for screening of animals by DNA analysis; crossing of separate homozygous lines to produce compound heterozygous or homozygous lines; and breeding to place the transgene on a distinct background that is appropriate for an experimental model of interest.

[0558] Transgenic animals of the invention have uses which include, but are not limited to, animal model systems useful in elaborating the biological function of polypeptides of the present invention, studying conditions and/or disorders associated with aberrant expression, and in screening for compounds effective in ameliorating such conditions and/or disorders.

### Example 14

### Knock-Out Animals

[0559] Endogenous gene expression can also be reduced by inactivating or “knocking out” the gene and/or its promoter using targeted homologous recombination. (E.g., see Smithies et al., Nature 317: 230-234 (1985); Thomas & Capecchi, Cell 51: 503512 (1987); Thompson et al., Cell 5: 313-321 (1989)) Alternatively, RNAi technology may be used. For example, a mutant, non-functional polynucleotide of the invention (or a completely unrelated DNA sequence) flanked by DNA homologous to the endogenous polynucleotide sequence (either the coding regions or regulatory regions of the gene) can be used, with or without a selectable marker and/or a negative selectable marker, to transfect cells that express polypeptides of the invention in vivo. In another embodiment, techniques known in the art are used to generate knockouts in cells that contain, but do not express the gene of interest. Insertion of the DNA construct, via targeted homologous recombination, results in inactivation of the targeted gene. Such approaches are particularly suited in research and agricultural fields where modifications to embryonic stem cells can be used to generate animal offspring with an inactive targeted gene (e.g., see Thomas & Capecchi 1987 and Thompson 1989, supra). However, this approach can be routinely adapted for use in humans provided the recombinant DNA constructs are directly administered or targeted to the required site in vivo using appropriate viral vectors that will be apparent to those of skill in the art.

[0560] In further embodiments of the invention, cells that are genetically engineered to express the polypeptides of the invention, or alternatively, that are genetically engineered not to express the polypeptides of the invention (e.g., knockouts) are administered to a patient in vivo. Such cells may be obtained from the patient (i.e., animal, including human) or an MHC compatible donor and can include, but are not limited to fibroblasts, bone marrow cells, blood cells (e.g., lymphocytes), adipocytes, muscle cells, endothelial cells etc. The cells are genetically engineered in vitro using recombinant DNA techniques to introduce the coding sequence of polypeptides of the invention into the cells, or alternatively, to disrupt the coding sequence and/or endogenous regulatory sequence associated with the polypeptides of the invention, e.g., by transduction (using viral vectors, and preferably vectors that integrate the transgene into the cell genome) or transfection procedures, including, but not limited to, the use of plasmids, cosmids, YACs, naked DNA, electroporation, liposomes, etc.

[0561] The coding sequence of the polypeptides of the invention can be placed under the control of a strong constitutive or inducible promoter or promoter/enhancer to achieve expression, and preferably secretion, of the polypeptides of the invention. The engineered cells which express and preferably secrete the polypeptides of the invention can be introduced into the patient systemically, e.g., in the circulation, or intraperitoneally.

[0562] Alternatively, the cells can be incorporated into a matrix and implanted in the body, e.g., genetically engineered fibroblasts can be implanted as part of a skin graft; genetically engineered endothelial cells can be implanted as part of a lymphatic or vascular graft. (See, for example, Anderson et al. U.S. Pat. No. 5,399,349; and Mulligan & Wilson, U.S. Pat. No. 5,460,959, the contents of which are hereby incorporated by reference herein in their entirety).

[0563] When the cells to be administered are non-autologous or non-MHC compatible cells, they can be administered using well known techniques which prevent the development of a host immune response against the introduced cells. For example, the cells may be introduced in an encapsulated form which, while allowing for an exchange of components with the immediate extracellular environment, does not allow the introduced cells to be recognized by the host immune system.

[0564] Transgenic and “knock-out” animals of the invention have uses which include, but are not limited to, animal model systems useful in elaborating the biological function of polypeptides of the present invention, studying conditions and/or disorders associated with aberrant expression, and in screening for compounds effective in ameliorating such conditions and/or disorders.

[0565] While preferred illustrative embodiments of the present invention are described, one skilled in the art will appreciate that the present invention can be practiced by other than the described embodiments, which are presented for purposes of illustration only and not by way of limitation. The present invention is limited only by the claims that follow.

The application's sequence listing, which the Patent Office published only in electronic form, follows.

SEQUENCE LISTING (240 sequences)

SEQ ID NO: 1 - DNA, 547 bp, Homo sapien
  misc_feature (103)..(103): n=a, c, g or t
  misc_feature (112)..(112): n=a, c, g or t
  misc_feature (208)..(208): n=a, c, g or t
  misc_feature (243)..(243): n=a, c, g or t
  misc_feature (277)..(277): n=a, c, g or t
cagaagagtattcacgcctgcaatgtaggtggccgactcctgtgtcaggacaggccacctacattgcagaagagtattcacgcctgcgcagccaggatagcantgagctcangacaccggccagggacattctcgcgagttacagccctgaacgacgtggaaactcgtgattcgacgtggccacatgcccgatgcgaaggccctgcantgagcagagacgtgtggacccctgcaggatgcagncaggaagctgtggagttggtccagtatgcttacntttagagaaggttcgtggagaacggagaagaaacgtaagaagcgaagtgamggatkwastcarrgacagaagatgaagaggagaaaagccaagaggaycmkgragcgaagaggaagagaaggaagactcgccagccagatgccaaagatggggattcatacgamccctatgacttcagtgacacagaggaggaaatgcctcaagtacacactccaaagacggcagactcacaggagaccaaggaatcccagaaagtggagttgagtgaat

SEQ ID NO: 2 - DNA, 325 bp, Homo sapien
ggcctggattaatacccctcgaagacaaggaggactatgggccgaataaggagtgtccactgtgcctttgtccaagattgtttgaatccctaagtcgagatctcaaaaggactatggtgtatacctagaggactcaggccacactcttagaggtctcttcattattgatgacaaaggaatcctaagacaaattactctgaatgatcttcctgtgggtagatcagtggatgagacactacgtttggttcaagcattccagtacactgacaaacacggagaagtctgccctgccggctggaaacctggtaagtgaaacaataatccc

SEQ ID NO: 3 - DNA, 1165 bp, Homo sapien
  misc_feature (44)..(44): n=a, c, g or t
  misc_feature (50)..(50): n=a, c, g or t
  misc_feature (57)..(58): n=a, c, g or t
  misc_feature (60)..(61): n=a, c, g or t
  misc_feature (66)..(66): n=a, c, g or t
  misc_feature (68)..(68): n=a, c, g or t
  misc_feature (70)..(74): n=a, c, g or t
  misc_feature (76)..(76): n=a, c, g or t
  misc_feature (78)..(78): n=a, c, g or t
  misc_feature (80)..(81): n=a, c, g or t
  misc_feature (83)..(84): n=a, c, g or t
  misc_feature (87)..(87): n=a, c, g or t
  misc_feature (95)..(95): n=a, c, g or t
  misc_feature (98)..(98): n=a, c, g or t
  misc_feature (101)..(101): n=a, c, g or t
  misc_feature (104)..(104): n=a, c, g or t
  misc_feature (110)..(111): n=a, c, g or t
aaccgctccggcaacgccaaccgctccgctgcgcgcaggctggnctgcangctctcnncnncagcncncnnnnnancnannannccncttccaanatntcncanctctcnncctccctctgctgcctgctggtgttggccaatgcccggagcaggccctctttccatcccctgtcggatgagctggtcaactatgtsaacaaacggaataccacgtggcaggccgggcacaacttctacaacgtggacatgagctacttgaagaggctatgtggtaccttcctgggtgggcccaagccaccccagagagttatgtttaccgaggacctgaagctgcctgcaagcttcgatgcacgggaacaatggccacagtgtcccaccatcaaagagatcagagaccagggctcctgtggctcctgctgggccttcggggctgtggaagccatctctgaccggatctgsatycacaccaatgcgcacgtcgagcgtggaggtgtcggcggaggacctgctcacrtgctgtggcagcatgtgtggggacggctgtaatggtggctatcctgctgaagcttggaacttctggacaagaaaaggcctggtttctggtggccatctatgaatcccatgtagggtgcagaccgtaytccataccctccctgtgagcaccacgtcgaaggggtcccggbccccatgcacgggggagggagatacccscargtgtagcaagakctgtgagcctgggtacagaccgactayaaacwggacamgcgytayggatacaattctacaggtstccaatagcgaggacrtcatggcygagatctmaaaaaacggcccgtggagggagctttctctgtgtatcggacttcctggtctagaagtcagggagtgtaccaacacgtcaccggagagatgattgggtgggcatgccatccggatcctgggctggggagtggcgaaggacaccctactggtggttgcatcggaaacactgactggggtgacatgggtcttaaatacccgaggcaggacacgtgggaccgcacacatggggggggaaccggccgagcagcggaaaaataatgcgggcgtggcactgcggccacaggaaaacgtaatcagcacacaaaaagaggaggcaggaacaacccggaaactgacgtgga

SEQ ID NO: 4 - DNA, 754 bp, Homo sapien
  misc_feature (29)..(29): n=a, c, g or t
  misc_feature (135)..(135): n=a, c, g or t
  misc_feature (176)..(176): n=a, c, g or t
  misc_feature (235)..(235): n=a, c, g or t
  misc_feature (256)..(256): n=a, c, g or t
tcacctccctccacgaggacgattggcgntctcggccttcccggggccctgccctcaccccgatccgggatgaggagtggggtggccactccccccggagtcccaggggatgggaccaggagcccgccagggagnaggcaggcgggggctggcgggccaggcggccccgggcccgntccgatagacgccactggacgacctcaccccgccgagcaccgcacgagtcagggagcanctctcccacgaataatggtgngagaagccgggcactacatgcccccgcagagccccagccgggacgacctctatgaccaagacaactctagggacattcccacgctaccacaggcgacccccatctacgacaacattcaggctcctcgggagcgccctcctgcctaccccaggtcccaccaccaccgtacccgggaccctcgggacaacggctccaggtccggggacctcccctatgatgggcggctactggaggaggctgtgaggaagaaaggggtcggaggagaggaggataccccacaaggaggaggaggaagaggcctactacccgcccgcgccgcccccgtactcggagaccgactcgcaggcgtcccgagagcgcaggctcaagaagaacttggccctgagtcgggaaagtttagtcgtctgatctgacgttttctacgtagctttygtattttttwtyytaatttgaaggcacactgatgaagcataccgtacccctccgagttataacgtc

SEQ ID NO: 5 - DNA, 1269 bp, Homo sapien
cagcccgcgcgggtactgtgtgagtctgcgtctggtgggacggggacgggcgcggtggaaggttgataggcgctgtgggtttgagcttggtgcgttgtgcgcgttgagggggttatgttgttcggtgtcctgtgtgtttgtatatgggatagtgtgtgcttggctgtgctgaggtgtgtgctcgggtgtgttattggcgtggtcagatgcgtcttggagttttcgtgaggcgcctttgtgtgtccccgggcgcggggatgacgttgtgttggtcgtggtgtgcttgtgggagccacacgtgggaactgcggttggaaaatattatagaagggctaaatgtgggggcccatcctcccttgacgggatttgtatgatgtctagtgagggacgcgacgtatgtgggggcttgcgtttcctgtcgtgcatctgagagtgtacggtgttatggcgtgcactatgccgtttctcaaaaaagtttccttgttgaggcatagcatcaggagtctgaggtcgctctttggtcattacccttgggaatattaagtgtgttcatcaggctggtgttgttagttagtaaacagctgtgttaataattagagtactggttcttaagtgatatcagttattgttagggtatgatgttaagactattgatttcacctatacagtgaggatataggtttataagagatacttcatccagcatacccttactctgccagagtagtgaagctaattaaacacgtttggtttctgaataaattgaactaaatccaaactatttcctaaaatcacaggacattaaggaccaatagcatctgtgccagagatgtactgttattagctgggaagaccaattctaacagcaaataacagtctgagactcctcatacctcagtggttagaagcatgtctctcttgagctacagtagaggggaagggattgttgtgtagtcaagtcaccatgctgaatgtacactgattcctttatgatgactgcttaactccccactgcctgtcccagagaggctttccaatgtagctcagtaattcctgttactttacagacaggaaagttccagaaactttaagaacaaactctgaaaacctatgagcaaatggtgctgaatacwttttttttaaagccacatttcattgtcttagtcaaagcaggmttattaastgattatttaaaattcrwywtkwtawattagcaacttcaagtataacawcttwkaaactggaataagtgtttattttctattaata

SEQ ID NO: 6 - DNA, 1403 bp, Homo sapien
cagcccgcgcgggtactgtgtgagtctgcgtctggtgggacggggacgggcgcggtggaaggttgataggcgctgtgggtttgagcttggtgcgttgtgcgcgttgagggggttatgttgttcggtgtcctgtgtgtttgtatatgggatagtgtgtgcttggctgtgctgaggtgtgtgctcgggtgtgttattggcgtggtcagatgcgtcttggagttttcgtgaggcgcctttgtgtgtccccgggcgcggggatgacgttgtgttggtcgtggtgtgcttgtgggagccacacgtgggaactgcggttggaaaatattatagaagggctaaatgtgggggcccatcctcccttgacgggatttgtatgatgtctagtgagggacgcgacgtatgtgggggcttgcgtttcctgtcgtgcatctgagagtgtacggtgttatggcgtgcactatgccgtttctcaaaaaagtttccttgttgaggcatagcatcaggagtctgaggtcgctctttggtcattacccttgggaatattaagtgtgttcatcaggctggtgttgttagttagtaaacagctgtgttaataattagagtactggttcttaagtgatatcagttattgttagggtatgatgttaagactattgatttcacctatacagtgaggatataggtttataagagatacttcatccagcatacccttactctgccagagtagtgaagctaattaaacacgtttggtttctgaataaattgaactaaatccaaactatttcctaaaatcacaggacattaaggaccaatagcatctgtgccagagatgtactgttattagctgggaagaccaattctaacagcaaataacagtctgagactcctcatacctcagtggttagaagcatgtctctcttgagctacagtagaggggaagggattgttgtgtagtcaagagagacatgcttctaaccactgaggtatgaggcatgtctctcttgagctacagtagaggggaagggattgttgtgtagtcaagtcaccatgctgaatgtacactgattcctttatgatgactgcttaactccccactgcctgtcccagagaggctttccaatgtagctcagtaattcctgttactttacagacaggaaagttccagaaactttaagaacaaactctgaaagacctattcagcaccatttgctcataggtctttcagagtttgttcttaaagacctatgagcaaatggtgctgaatacwttttttttaaagccacatttcattgtcttagtcaaagcaggmttattaastgattatttaaaattcrwywtkwtawattagcaacttcaagtataacawcttwkaaactggaataagtgtttattttctattaata

SEQ ID NO: 7 - DNA, 200 bp, Homo sapien
ccaccggcaggttgtactcaccacctgaatgcagaggaaaatctctaacttccaaaggtcccaccaagcagttcagaaacctaccaccagtaaatgttccaactacagaagtctcaccaacttctcagaaaaccaccacaaaaaccaccacaccaaatgctcawgcwacacggagtacacctgccagggatcctctagaa

SEQ ID NO: 8 - DNA, 983 bp, Homo sapien
ctctgggccctgtgttttcccgagcaccttttctgactctggtctggattacatgtgtcggtatgtggcacttgtccccttttgcccttggtatatgcgacccttctattgtattgcgccctttgtgcccgcactttccggtccatgtcggggatgatggatcccccttcccctttgctcagttgcctcctggggccaggggcccctcaccacaaggggtctggatatacagtttcataaggcctggccctcccatgtttgcatgcctatgtacttctacgccaaacgtgtcagcccttcctcctgaagctctctgccgtgcctccctgttctgggaggacggtggtgcggtgtgactgaatttgggcctcttgtacagttaactctcccaggtggattttgtggaggtgagtaaaaggggcattgagactataaagcagtagacaatccccacataccatctgtagagttggaactgcattctttcaaagtwtkrrtawgcatatayttgtagggctgtagacttacggtcctawtaktctkwttrccatygcttattctwgagcacwaaagtgataatcaattakyacasttsawacatcacctttwttgacttgttccaagcccttttacagctcwwtggcattttcctcgcymaggcctgtgaggtaactgggatcgcaccttttataccagagacctgaggcagatgaaatwtatttccatctaggactagaaaaacttgggtctcttaccgcgagactgagaggcagaagtcagcccgaatgcctgtcagtttcatggaggggaaacgcaaaacctgcagttcctgagtaccttmtacaggcmcggcccagcytaggcccggggtggcaacaccacagcaagccggccccccctcttttggccttgtggataagggagagttgaccgttttcatcctgcctccgttattgtaacttggaggtttacacgggtgcgtt

SEQ ID NO: 9 - DNA, 676 bp, Homo sapien
  misc_feature (676)..(676): n=a, c, g or t
caaagacttcgactcccctgagaacggtgcggacagcttccagagctcagactccctccttcagtcctggaacagccagtcgtccttgctggatgtgcaacgggttccttccttcgagagcttsgragrtgactgcakccwkastctmtkcctcaataagccaacatgtmtttcaaggattacatccaagagaggagtgacccrktggagcaaggcaaaccagttatacctgcagctgtgctggccggcttcacaggaagtggacctattcagctgtggcagtwtctcctggagctgytatcasacaaatcctgccagtcattcatcasctggactgkagackgatggsagtttaagctcgccgaccccgatgaggtggcccgccagtggggaaagaggcttagcccacgatgaactacgagaagctgaaccggggcttacgctactattacgactagaacatcatgcacaagacgtcggagaaagcgctacgtgttctcgattaaatgtgcggacctcagaaacttgcttggggtttcaacgccccgagggaactgtaacgcgcataacctgggcagtaacaaccccgtacaccggaaggtacttgacgttccgcccggggacccaccccttgaacccggctccccaaggcttcgtggtacctgttgggtgcccn

SEQ ID NO: 10 - DNA, 2220 bp, Homo sapien
gggggggagaagaggggagggcatcatggggccagtgccgtctgttcggccctgggaagctgcgctgggctggcttgcctcctgtgtggctgtgccagggccatccaggagtgttgcacttgggacctggaggatgggaaggccgagaggcctttggactgctaaaccatctggaagtcagccttttacagacttcggcaggttccggctctccaggtgtgatgggttcaggatggctgaacctggagatagtctggagtctctttgaaggacctgcttggctcctgctgcaaaggaactgcaggcatttgtccttcccttccctcccccaccccactgctgaaaaaggttggcggggggaaagcagctctgcttttcacagtgtatacgtgtcaggagacagcagaggtgctgggttgaagattgcaggtggcaggcccagcccaggctgctgctcagtgggtgcctggccttcatcatctcggcccacctgcttcttgtggtgtggccagtcccagctgccgtcttaaagcagatgtgcgcaacagtgtacaggcacacctgccatagcaaattcctaggatacctcagtcctccatgttggtatgcttttcttttcaacaatgtggaaaatgcagtttaccaagaagcttttttggttttccttttaaggtattacttcaaaaaagcaagcgatgagtttgcctgtggagcggtgtttgaggagatctgggaggatgagacggtgctcccgatgtatgaaggccggattctgggcaaagtggagcggatcgattgagccctggggtctggctttggtgaactgttggagcccgaagctcttgtgaactgtcttggctgtgagcaactgcgacaaaacattttgaaggaaaattaaaccaatgaagaagacaaagtctaaggaagaatcggccagtgggccttcgggagggcggggggaggttgattttcatgattcatgagctgggtactgactgagataagaaaagcctgaactatttattaaaaacatgaccactcttggctattgaagatgctgcctgtatttgagagactgccatacataatatatgacttcctagggatctgaaatccataaactaagagaaactgtgtatagcttacctgaacaggaatccttactgatatttatagaacagttgatttcccccatccccagtttatggatatgctgctttaaacttggaagggggagacaggaagttttaattgttctgactaaacttaggagttgagctaggagtgcgttcatggtttcttcactaacagaggaattatgctttgcactacgtccctccaagtgaagacagactgttttagacagactttttaaaatggtgccctaccattgacacatgcagaaattggtgcgttttgttttttttttttcctatgctgctctgttttgtcttaaaggtcttgagggttgaccatgttgcgtcatcatcaacattttgggggttgtgttggatgggatgatctgttgcagagggagaggcagggaaccctgctccttcgggccccaggttgatcctgtgactgaggctccccctcatgtagcctccccaggcccagggccctgaggcctgctagaatcactgccgctgtgctttcgtggaaatgacagttccttgttttttttgtttctgtttttgttttacattagtcattggaccacagccattcaggaactaccccctgccccacaaagaaatgaacagttgtagggagacccagcagcacctttcctccacacaccttcattttgaagttcgggtttttgtgttaagttaatctgtacattctgtttgccattgttacttgtactatacatctgtatatagtgtacggcaaaagagtattaatccactatctctagtgcttgactttaaatcagtacagtacctgtacctgcacggtcacccgctccgtgtgtcgccctatattgagggctcaagctttcccttgttttttgaaaggggtttatgtataaatatattttatgcctttttattacaagtcttgtactcaatgacttttgtcatgacattttgttctacttatactgtaaattatgcattataaagagttcatttaaggaaaattacttggtacaataattattgtaattaagagatgtagcctttattaaaattttatatttttcaaaaaaaaaaa

SEQ ID NO: 11 - DNA, 1407 bp, Homo sapien
  misc_feature (1175)..(1175): n=a, c, g or t
tcgacccaksgcgatcwcggaggagaagcaggagctgtcgggaagatcagaagccagtcatggatgaccagcgcgaccttatctccaacaatgagcaactgcccatgctgggccggcgccctggggccccggagagcaagtgcagccgcggagccctgtacacaggcttttccatcctggtgactctgctcctcgctggccaggccaccaccgcctacttcctgtaccagcagcagggccggctggacaaactgacagtcacctcccagaacctgcagctggagaacctgcgcatgaagcttcccaagcctcccaagcctgtgagcaagatgcgcatggccaccccgctgctgatgcaggcgctgcccatgggagccctgccccaggggcccatgcagaatgccaccaagtatggcaacatgacagaggaccatgtgatgcacctgctccagaatgctgaccccctgaaggtgtacccgccactgaaggggagcttcccggagaacctgagacaccttaagaacaccatggagaccatagactggaaggtctttgagagctggatgcaccattggctcctgtttgaaatgagcaggcactccttggagcaaaagcccactgacgctccaccgaaagtactgaccaagtgccaggaagaggtcagccacatccctggctgtccacccgggttcattcaggcccaagtgcgacgagaacggcaactatctgccactccagtgctatggggagcatcggctactgctggtgtgtcttccccaacggcacggaggtccccaacaccagaagccgcgggcaccataactgcagtgagtcactggaactggaggacccgtcttctgggctgggtgtgaccaagcaggatctgggcccagtccccatgtgagagcagcagaggcggtcttcaacatcctgccagccccacacagctacagctttcttgctcccttcagcccccagcccctccccatctcccaccctgtacctcatcccatgagaccctggtgcctggctctttcgtcacccttggacaagacaaaccaagtcggaacagcagataacaatgcagcaaggccctgctgcccaatctccatctgtcaacaggggcgtgaggtcccaggdaagtggccaaaagcctagacagataccccggttcnctgacavtacacagcagcctccaacacaaggctccaaagkacctagggctcatggacgagkatgggaaggcacagggagaagggataaccctacaccckagaccccaggctggacatgctgactgtcctctcccctccagcctttggccttggcttttctagcctatttacmtgcaggctgagccactcwyrttccctttccccagccatcactccccgaggaagagccaat

SEQ ID NO: 12 - DNA, 673 bp, Homo sapien
ggtcgcactggtgatgcggtctgttgtcccccggcctcctggactcctggtcccskggtctcccagcgctggtttcgacttcagcttcctgccccagccacctcaagagaaggctcacgatggtggccgctactaccgggctgatgatgccaatgtggttcgtgaccgtgacctcgaggtggacaccaccctcaagagcctgagccagcagatcgagaacatccggagcccagagggcagccgcaagaaccccgcccgcacctgccgtgacctcaagatgtgccactctgactggatgagtggcgagtagtggattgatcccaaactaaggctgcaggctggatgccatcctattcgttgcatgcgatcaatggagactggtgagacgctgcgtgtaccccactcagcgtcagtgtggcgccagaagaactggtacatcagcaagaaccccaaggacaagaggcatgtctggttcggcgagagcatgaccgatggattccagttcgagtatggcggccagggctccgaccctgccgatgtggccatccagctgaccttcctgcgcctgatgtccascgaggccttccagaacatcacctaccactgtaagaacagtgtggcctacatggaccaccagactggcaaccttaagaaggccctgctcctccagggc

SEQ ID NO: 13 - DNA, 382 bp, Homo sapien
agcagcatggcacttaacagagagttctctttcattgtgatcactaccgtgacacttactttgtgcctatcaggactttttgcaatattgcgctctgtcggctttccaatcttcagggatatcatcgagctagaccattccctactatggatttattttttttcctttcaaacacagtaaggaaacaatctattacttttttccttaaaaggagaatttatagcactgtaatacagctwwaaaatatttttagaatgatgtaaatagttaaccttcagtagtctattaaggcattaatacttctctgacatgcgcgtttgagggtggaggggtcctgaaggtgcttcatcgtctgtgattactgcttgggatgtgttctttg

SEQ ID NO: 14 - DNA, 911 bp, Homo sapien
  misc_feature (911)..(911): n=a, c, g or t
agcggaacggagagaacaggaaagcgcgaggagccgvcgccaccaccagcgcagcagtcctggagctgtgaggagattcgggccgtcaccctgcctcccctgcgtcccgccaccggccgcttctgtcctcggacccattccaacaatctcgtaaaacatggtggattactatgaagttctaggcgtgcagagacatgcgctctacccgagggatattacaaaaggcatatcgggaaactggcactgaagtggcatccagataaaaatcctgagaataaagaagaagcagcagcagaaaattcaagcaagtagcggaggcatatgaagtgctgtcggatgctaagaaacgggacatctatgacaaatatggcaamagaaggattaaatggtggaggacggaggtggaagtcattttgacagtccatttgaatttggcttcacattccgtaacccagatgatgtcttcagggaattttttaggtggaagggacccattttcatttgacttctttgaagacccttttgaggacttctttgggaatcgaaggggtccccgaggaagcagaagccgagggacggggtcgttttaktctgcgttcagtggatttccgtcttttgtaagtggatggtcttctatggatgcaggatttacttcattggggtcactgggtcacggggtcctcactctattctcttccacgtcatttggtggtagtggcatgggcaactataaatcgatatcaacttccactaaattggttaatggcagaccaatcactacaaagagaattgttgataacagtcaagacagagtacaagttgaagatgatggccagttaaagttcttaactattggttatgagcagctgctgtgcttggataacaagtgattcaacgcacgcgcttagctn

SEQ ID NO: 15 - DNA, 431 bp, Homo sapien
ttaagakcgckacgggcgctttcctttcagcggagcgcggcggcaagatggcagtgcaaatatccaagaagaggaagtttgtcgctgatggcatcttcaaagctgaactgaatgagtttcttactcgggagctggctgaagatggctactctggagttgaggtgcgagttacaccaaccaggacagaaatcattatcttagccaccagaacacagaatgttcttggtgagaagggccggcggattcgggaactgactgctgtagttcagaagaggtttggctttccagagggcagtgtagagctttatgctgaaaaggtggccactagaggtctgtgtgccatttscccagcagagyytytgcsgtacmaactcyaggasggctcgctgcgccgcgtctttcctatcgctgtcccgcacgcccatggggcc

SEQ ID NO: 16 - DNA, 1047 bp, Homo sapien
  misc_feature (7)..(7): n=a, c, g or t
  misc_feature (64)..(64): n=a, c, g or t
  misc_feature (66)..(66): n=a, c, g or t
  misc_feature (71)..(71): n=a, c, g or t
  misc_feature (73)..(73): n=a, c, g or t
  misc_feature (80)..(80): n=a, c, g or t
  misc_feature (95)..(95): n=a, c, g or t
  misc_feature (110)..(110): n=a, c, g or t
  misc_feature (136)..(136): n=a, c, g or t
cccatgncctgcagaaacacctggctgggctgggcctgactgaggccattgacaagaacaaggntnttttntnacgcatntcaggcaagaagganttttacctggcccantttccacgccaccgcctttgagttgnacacagatggcaacccctttgaccaggacatctacgggcgcgagggaggcgcagccccaagctgttctacgccgaccaccccttcatcttcctagtgcgggacacccaaagcggctccctgctattcattgggcgcctggtccggcctaagggtgacaagatgcgagacgagttatagggcctcagggtgcacacaggatggcaggaggcatccaaaggctcctgagacacatgggtgctattggggttgggggggaggtgaggtaccagccttggatactccatggggtgggggtggaaaaacagaccggggttcccgtgtgcctgagcggaccttcccagctagaattcactccacttggacatgggccccagataccatgatgctgagcccggaaactccacatcctgtgggacctgggccatagtcattctgcctgccctgaaagtcccagatcaagcctgcctcaatcagtattcatatttatagccaggtaccttctcacctgtgagaccaaattgagctaggggggtcagccagccctcttctgacactaaaacacctcagctgcctccccagctctatcccaacctctcccaactataaaactaggtgctgcagcccctgggaccaggcacccccagaatgacctggccgcagtgaggcggattgagaaggagctcccaggaggggcttctgggmagactctggtcaagaagcatcgtgtctggcgttgtggggatgaactttttgttttgtttcttccttttttagttcttcaaagatagggagggaagggggaacatgagcctttgttgctatcaatccaagaacttatttgtacatttttttttcaataaaacttttcccartgsaaaraaacccaaaaaaaccgagactagttctctcc

SEQ ID NO: 17 - DNA, 833 bp, Homo sapien
cctgatgtcgccacgatttcccgctcggccgtgggtggtgaagcttgtagcctcgctccatgaggatctttcatgaggtatcggtcaggtcccggcccagcccggtcccaacgcccggatggctgggggagggcgtagccctcgtagatgggccccctgtgggtgaccccctctcccgagtccctgaccatgccgcgttcgcaccaaaaccgtgaagaaggcggcccgggtcatcatagaaaagtactacacgcgcctgggcaacgacttccacacgaacaagcgcgtgtgcgaggagatcgccattatccccagcaaaaagctccgcaacaagatagcaggttacgtcacgcatctgatgaagcgaattcagagaggcccagtaagaggtatctccatcaagctgcaggaggaggagagagaaaggagagacaattatgttcctgaggtctcagccttggatcaggagattattgaagtagatcctgacactaaggaaatgctgaagcttttggacttcggcagtctgtccaaccttcaggtcactcagcctacagttgggatgaatttcaaaacgcctcggggacctgtttgaattttttctgtagtgctgtattattttcaataaattctgggaccaccagccttagaaacacaagaaagagaaactgggaggcctatattgcgggggcgggaaagaggggttggagaagatgggcctaaccggtggtgtatcctggttgtcgctgacgcagaggtttgctgtgtactagatggggcagaatctggccgggtccctatagtggaggtctgcatgaattacaataaacgag

SEQ ID NO: 18 - DNA, 1106 bp, Homo sapien
cagtaagtttggcatgggtgcagagggaggggtccagtgcaccttttgagtccttacctcgtgggtagttgttgccttgtgactgcccattagggcaattgaatagcacattggtggctatacgttgttgcacagtgctcaagtgcatagcgccctgccggttgttcgcaaggcaggagcaactcctttttaggcaacgggggtctctaatgcccgagcactgtgggcttggtcacaggaggtgcgcatgtcagcagcacggagcctccccgggcaggatgacttttgagggggacacagatgtctgggcaatgccagggtcctgggaacagaggccccgagcaggaccaggagtgcgggcagcgcgggccgggggcttctgggagccaaaggcgaggctgaggttgcaaactctggggccaacatgggccgcgttcgcaccaaaaccgtgaagaaggcggcccgggtcatcatagaaaagtactacacgcgcctgggcaacgacttccacacgaacaagcgcgtgtgcgaggagatcgccattatccccagcaaaaagctccgcaacaagatagcaggttacgtcacgcatctgatgaagcgaattcagagaggcccagtaagaggtatctccatcaagctgcaggaggaggagagagaaaggagagacaattatgttcctgaggtctcagccttggatcaggagattattgaagtagatcctgacactaaggaaatgctgaagcttttggacttcggcagtctgtccaaccttcaggtcactcagcctacagttgggatgaatttcaaaacgcctcggggacctgtttgaattttttctgtagtgctgtattattttcaataaatstgggacmacagcataaaatataaaagacagagagcaataaatgcaactgcaaataatgcctgctccaagcacgacacaaaaaacagaaccatccggcaaaaccaaaacaaatagaaacaccgacatacacagcaaacaaggacatgaaccagcaacccgcgatgaagacaaaacaaacgcgcgacgcaaaaagaacaaaccataccaccgaaggatactccacaccaacccggcaaat

SEQ ID NO: 19 - DNA, 744 bp, Homo sapien
taacaggcttcgcctgtgcttcctgtttcctcttttaccaaggacccgccaacatgggccgcgttcgcaccaaaaccgtgaagaaggcggcccgggtcatcatagaaaagtactacacgcgcctgggcaacgacttccacacgaacaagcgcgtgtgcgaggagatcgccattatccccagcaaaaagctccgcaacaagatagcaggttacgtcacgcatctgatgaagcgaattcagagaggcccagtaagaggtatctccatcaagctgcaggaggaggagagagaaaggagagacaattatgttcctgaggtctcagccttggatcaggagattattgaagtagatcctgacactaaggaaatgctgaagcttttggacttcggcagtctgtccaaccttcaggtcattcatcccaactgtaggctgagtgacctgaaggttggacagactgctcagcctacagttgggatgaatttcaaaacgcctcggggacctgtttgaattttttctgtagtgctgtattattttcaataaattctgggaccaccagccttagaaacacaagaaagagaaactgggaggcctatattgcgggggcgggaaagaggggttggagaagatgggcctaaccggtggtgtatcctggttgtcgctgacgcagaggtttgctgtgtactagatggggcagaatctggccgggtccctatagtggaggtctgcatgaattacaataaacgag

SEQ ID NO: 20 - DNA, 1559 bp, Homo sapien
cttgcggcttgcggcatkggcagtatcygcckscatcctcttccgtgaggcgcgctgagaccctggacyggcctcctgaraggwtgccggtgcgggcgcccgcggagagggacccgtcgccatgggccgtgtgatccgtggacagaggaagggcgccgggtctgtgttccgcgcgcacgtgaagcaccgtaaaggcgctgcgcgcctgcgcgccgtggatttcgctgagcggcacggctacatcaagggcatcgtcaaggacatcatccacgacccgggccgcggcgcgcccctcgccaaggtggtcttccgggatccgtatcggtttaagaagcggacggagctgttcattgccgccgagggcattcacacgggccagtttgtgtattgcggcaagaaggcccagctcaacattggcaatgtgctccctgtgggcaccatgcctgagggtacaatcgtgtgctgcctggaggagaagcctggagaccgtggcaagctggcccgggcatcagggaactatgccaccgttatctcccacaaccctgagaccaagaagacccgtgtgaagctgccctccggctccaagaaggttatctcctcagccaacagagctgtggttggtgtggtggctggaggtggccgaattgacaaacccatcttgaaggctggccgggcgtaccacaaatataaggcaaagaggaactgctggccacgagtacggggtgtggccatgaatcctgtggagcatccttttggaggtggcaaccaccagcacatcggcaagccctccaccatccgcagagatgcccctgctggccgcaaagtgggtctcattgctgcccgccggactggacgtctccggggaaccaagactgtgcaggagaaagagaactagtgctgagggcctcaataaagtttgtgtttatgccaaaaaaaaaaaaaaaaaaaaagaaaacaaaaaaaaaaaaaaaaaaaaaggcagaaaaaaaaaaagaaaaaccaaagcaaaaggaagaaaaaagaaaaaaagaaaaagaagaagaagaggcagagaggagaacaagagggcgcaccacacacagccagcggggccaaacaccaccccacggcgacaacaaccgacagagagagagaccaaccctcacccaggcggagagggaggggcgcgcggagaagaaaaaaccacaaaaaacagccgaacacgcgcaacgaagcgaccacacacaaagcagaagaaaacaccgaaaagcctaagaaggaagaggcacgccaccccgccaccgggggcgacaacggcgcaccgaccacgcacgacagagcatagcaccaagcagcagaaggcggagcaaccatagacagccatcagacccacagccgaggaacacgacagacgcaccacccccaggcgcgccgaagcatagacgaacacacgagataaacaccacagtgacggcggcgcagaggaagcacacgacacatccaacgaaggaaagaacgaaacacaaagcaaaacaggccaccgccagaaacaatcagtcacgccagccccacacaccagc

SEQ ID NO: 21 - DNA, 1745 bp, Homo sapien
gcggccggccgggcaggtacctagaagagaggcgggtcaaagaagtagtgagataacgcatatctcaggtcataggctatcccatcaccctttatttggcgaaggrcagagaaggaaattagtgatgatgmwggcagaggaagagaaaggtgcagcaacarcacagcaggcaagcataacagcatgcatgaagcaaaagcccaagatcgmmagatgtgggttcagatgcaggcaggcatgacagcggtaaggcataagcaagaagcaaaactcaagcaagcatcaaagcagcaaatacattgatccaggcaagcaactaaacaagaccaagcctatttggaccagaaaccctgatgacatcacccaagaggagtatggagaattctacaagagcctcactaatgactgggaagaccacttggcagtcaagcacttttctgtagaaggtcacgttggaattcaggscattgctatttattcctcgtcgggctccctttgacctttgtgagaacaagaagaaaaagaacaacatcaaactctatgtccgccgtgtgttcatcatggacagctgtgatgagttgataccagagtatctcaattttatccgtggtgtggttgactctgaggatctgcccctgaacatctcccgagaaatgctccagcagagcaaaatcttgaaagtccattcgcaaaaacattgttaagaagtgccttgagctcttctctagagctggcagaagacaaggagaattacaagacaattcctatgagggcacttctcataaaaatctcaacgcttggaatccacgaagacatccactaaccggcgccgcctgtctgagagctgctgcgctatcatacctcccagtctggagatgagatgacatctctgtcagagtatgtttctcgcatgaaggagacacagaagtccatctattacatcactggtgagagcaaagagcaggtggccaactcagcttttgtggagcgagtgcggaaacggggcttcgaggtggtatatatgaccgagcccattgacgagtactgtgtgcagcagctcaaggaatttgatgggaagagcctggtctcagttaccaaggagggtctggagctgcctgaggatgaggaggagaagaagaagatggaagagagcaaggcaaagtttgagaacctctgcaagctcatgaaagaaatcttagataagaaggttgagaaggtgacaatctccaatagacttgtgtcttcaccttgctgcattgtgaccagcacctacggctggacagccaatatggagcggatcatgaaagcccaggcacttcgggacaactccaccatgggctatatgatggccaaaaagcacctggagatcaaccctgaccaccsccattgtggagacgctgcggcagaaggctgaggccgacgagaatgataaggcagttaaggacctggtggtgctgctgtttgaaaccgccctggtatcttctggcttttcccttgaggagtccccagacccactccaaccgcgatctatcgcatgatcaagctaggtctaggtattgatgaagatgaagtggcagcagaggaacccaatgctgcagttcctgatgagatcccccctctcgagggcgatgaggatgcgtctcgcatgcgaggaagtcgagttaggttaggagtcgtacttggaaacacttgtgcttttggtttttgtgtcccccatggggctcccactgcgcctcgagtgcccc

SEQ ID NO: 22 - DNA, 379 bp, Homo sapien
gtcgccaggtccgcaggtccgcctggccgagcaggaggcgccatcatgggagtggacatccgccataacaaggaccgaaaggttcggcgcaaggagcccaagagccaggatatctacctgaggctgttggtcaagttatacaggtttctggccagaagaaccaactccacattcaaccaggttgtgttgaagaggttgtttatgagtcgcaccaaccggccgcctctgtccctttcccggatgatccggaagatgaagcttcctggccgggaaaacaagacggccgtggttgtggggaccataactgatgatgtgcgggttcaggaggtacctcgccgcgaccacgcatccatcacactgcgccgctcgacatgcatct

SEQ ID NO: 23 - DNA, 1577 bp, Homo sapien
ttcccgcgggaatctggaccgcgaccggttccacggacggactccggggcgtccgtgggagctgggtgcctgaggaccttggcggtcgggccggggcaggagggtgcaggtggtcgtgattcgggatgcacagtaatctggcggtcagctgcgggcccgactgggatccggggcttcgggggcgcgcgccgtccggggtccgagctgggatcttgctgcgccgctcacgtactcacttctgctagtgatgtctggagctacggaattgtcatgtgggaggtcatgagctatggagagcgaccctactgggacatgagcaaccaggatgtcatcaatgccgtggagcaggattaccggctgccaccacccatggactgtcccacagcactgcaccagctcatgctggactgctgggtgcgggaccggaacctcaggcccaaattctcccagattgtcaataccctggacaagctcatccgcaatgctgccagcctcaaggtcattgccagcgctcagtctggcatgtcacagcccctcctggaccgcacggtcccagattacacaaccttcacgacagttggtgattggctggatgccatcaagatggggcggtacaaggagagcttcgtcagtgcggggtttgcatcttttgacctggtggcccagatgacggcagaagacctgctccgtattggggtcaccctggccggccaccagaagaagatcctgagcagtatccaggacatgcggctgcagatgaaccagacgctgcctgtgcaggtctgacaccggctcccacggggaccctgaggaccgtgcagggatgccaagcagccggctggactttcggactcttggacttttggatgcctggccttaggctgtggcccagaagctggaagtttgggaaaggcccaagctgggacttctccaggcctgtgttccctccccaggaagtgcgccccaaacctcttcatattgaagatggattaggagagggggtgatgacccctccccaagcccctcagggcccagaccttcctgctctccagcaggggatccccacaacctcacacttgtctgttcttcagtgctggaggtcctggcagggtcaggctggggtaagccggggttccacagggcccagccctggcaggggtctggccccccaggtaggcggagagcagtccctccctcaggaactggaggaggggactccaggaatggggaaatgtgacaccaccatcctgaagccagcttgcacctccagtttgcacagggatttgttctgggggctgagggccctgtccccacccccgcccttggtgctgtcataaaagggcaggcaggggcaggctgaggagttgccctttgccccccagagactgactctcagagccagagatgggatgtgtgagtgtgtgtgtgtgtgtgtgcgcgcgcgcgcgcgtgtgtgtgtgcacgcactggcctgcacagagagcatgggtgagcgtgtaaaagcttggccctgtgccctacaatggggccagctgggccgacagcagaataaaggcaataagatgaaaaaaaaaaaa

SEQ ID NO: 24 - DNA, 1833 bp, Homo sapien
tgcaaggccaggaagctacagggaaagttctgatcaaaatacacaaagacacaagccaggtccccaccgcgcttggcgatgcatccatagcagccttggtgctgtggacactccctggggcccagcgaaggggagagtttgctcccaaaggcgcaccaatgaccaacatttgccccccggaggaaagaactggaaccagcctctgacctgtccaggtgccctgtccagctgactgcaaggacagagaggagtcctgcccagctcttggatcagtctgctggccgaggagcccggtggagccaggggtgaccctggagcccagcctgccccgaggaggccccggctcagagccatgccaggtgtctgtgatagggcccctgacttcctctccccgtctgaagaccaggtgctgaggcctgccttgggcagctcagtggctctgaactgcacggcttgggtagtctctgggccccactgctccctgccttcagtccagtggctgaaagacgggcttccattgggaattgggggccactacagcctccacgagtactcctgggtcaaggccaacctgtcagaggtgcttgtgtccagtgtcctgggggtcaacgtgaccagcactgaagtctatggggccttcacctgctccatccagaacatcagcttctcctccttcactcttcagagagctggccctacaagccacgtggctgcggtgctggcctccctcctggtcctgctggccctgctgctggccgccctgctctatgtcaagtgccgtctcaacgtgctgctctggtaccaggacgcgtatggggaggtggagataaacgacgggaagctctacgacgcctacgtctcctacagcgactgccccgaggaccgcaagttcgtgaacttcatcctaaagccgcagctggagcggcgtcggggctacaagctcttcctggacgaccgcgacctcctgccgcgcgctgagccctccgccgacctcttggtgaacctgagccgctgccgacgcctcatcgtggtgctttcggacgccttcctgagccgggcctggtgcagccacagcttccggtgggtcccgcgcggggttgggtgggccccagcgtacacccacccccctgacggtcccgccccgcagggagggcctgtgccggctgctggagctcacccgcagacccatcttcatcaccttcgagggccagaggcgcgaccccgcgcacccggcgctccgcctgctgcgccagcaccgccacctggtgaccttgctgctctggaggcccggctccgtgactccttcctccgatttttggaaagaagtgcagctggcgctgccgcggaaggtgcggtacaggccggtggaaggagacccccagacgcagctgcaggacgacaaggaccccatgctgattcttcgaggccgagtccctgagggccgggccctggactcagaggtggacccggaccctgagggcgacctgggtgtccgggggcctgtttttggagagccatcagctccaccgcacaccagtggggtctcgctgggagagagccggagcagcgaagtggacgtctcggatctcggctcgcgaaactacagtgcccgcacagacttctactgcctggtgtccaaggatgatatgtagctcccaccccagagtgcaggatcatagggacagcgggggccagggcagcggcgtcgctcctctgctcaacaggaccacaacccctgccagcagccctgggaccctgccagcagccctgggaaaaggctgtggcctcagggcgcctcccagtgccagaaaataaagtccttttggattctga

SEQ ID NO: 25 - DNA, 2138 bp, Homo sapien
tgcaaggccaggaagctacagggaaagttctgatcaaaatacacaaagacacaagccaggtccccaccgcgcttggcgatgcatccatagcagccttggtgctgtggacactccctggggcccagcgaaggggagagtttgctcccaaaggcgcaccaatgaccaacatttgccccccggaggaaagaactggaaccagcctctgacctgtccaggtgccctgtccagctgactgcaaggacagagaggagtcctgcccagctcttggatcagtctgctggccgaggagcccggtggagccaggggtgaccctggagcccagcctgccccgaggaggccccggctcagagccatgccaggtgtctgtgatagggcccctgacttcctctccccgtctgaagaccaggtgctgaggcctgccttgggcagctcagtggctctgaactgcacggcttgggtagtctctgggccccactgctccctgccttcagtccagtggctgaaagacgggcttccattgggaattgggggccactacagcctccacgagtactcctgggtcaaggccaacctgtcagaggtgcttgtgtccagtgtcctgggggtcaacgtgaccagcactgaagtctatggggccttcacctgctccatccagaacatcagcttctcctccttcactcttcagagagctggccctacaagccacgtggctgcggtgctggcctccctcctggtcctgctggccctgctgctggccgccctgctctatgtcaagtgccgtctcaacgtgctgctctggtaccaggacgcgtatggggaggtggagataaacgacgggaagctctacgacgcctacgtctcctacagcgactgccccgaggaccgcaagttcgtgaacttcatcctaaagccgcagctggagcggcgtcggggctacaagctcttcctggacgaccgcgacctcctgccgcgcgctgagccctccgccgacctcttggtgaacctgagccgctgccgacgcctcatcgtggtgctttcggacgccttcctgagccgggcctggtgcagccacagcttccggtgggtcccgcgcggggttgggtgggccccagcgtacacccacccccctgacggtcccgccccgcagggagggcctgtgccggctgctggagctcacccgcagacccatcttcatcaccttcgagggccagaggcgcgaccccgcgcacccggcgctccgcctgctgcgccagcaccgccacctggtgaccttgctgctctggaggcccggctccgtggtgcggagcaggcgcgggagggtccggggctagcggcgggttagagatgggcggtgcccgggctccaggctgggacccctccgtggggagctctgcggcaccacgctttgtgaatgggccctggggggaggttccgctgcctggggccccgatgcggggagccgcccttgaggcccccggagccacggaatagctgtcgcagggcgtggaacccgtgggcagccgcaggtgtgctcttgggggccaggacgccaggggcttccgaggtgttcacacctgcaaaccgccccgacctggcccccaggactccttcctccgatttttggaaagaagtgcagctggcgctgccgcggaaggtgcggtacaggccggtggaaggagacccccagacgcagctgcaggacgacaaggaccccatgctgattcttcgaggccgagtccctgagggccgggccctggactcagaggtggacccggaccctgagggcgacctgggtgtccgggggcctgtttttggagagccatcagctccaccgcacaccagtggggtctcgctgggagagagccggagcagcgaagtggacgtctcggatctcggctcgcgaaactacagtgcccgcacagacttctactgcctggtgtccaaggatgatatgtagctcccaccccagagtgcaggatcatagggacagcgggggccagggcagcggcgtcgctcctctgctcaacaggaccacaacccctgccagcagccctgggaccctgccagcagccctgggaaaaggctgtggcctcagggcgcctcccagtgccagaaaataaagtccttttggattctga

SEQ ID NO: 26 - DNA, 676 bp, Homo sapien
cccccgcccctgcgccgccgacgcccgccctcccgcagagccctccgccgacctcttggtgaacctgagccgctgccgacgcctcatcgtggtgctttcggacgccttcctgagccgggcctggtgcagccacagcttccgactccttcctccgatttttggaaagaagtgcagctggcgctgccgcggaaggtgcggtacaggccggtggaaggagacccccagacgcagctgcaggacgacaaggaccccatgctgattcttcgaggccgagtccctgagggccgggccctggactcagaggtggacccggaccctgagggcgacctgggtgtccgggggcctgtttttggagagccatcagctccaccgcacaccagtggggtctcgctgggagagagccggagcagcgaagtggacgtctcggatctcggctcgcgaaactacagtgcccgcacagacttctactgcctggtgtccaaggatgatatgtagctcccaccccagagtgcaggatcatagggacagcgggggccagggcagcggcgtcgctcctctgctcaacaggaccacaacccctgccagcagccctgggaccctgccagcagccctgggaaaaggctgtggcctcagggcgcctcccagtgccagaaaataaagtccttttggattctga

SEQ ID NO: 27 - DNA, 1333 bp, Homo sapien
agatgctgtcgagcggcgcagtgtgatggatcgtggtcgcggcgaggaatggagagcacggtctgaatctgcacagagcaagatgctgagtggagtcgggggctttgtgctgggcctgctcttccttggggccgggctgttcatctacttcaggaatcagaaaggacactctggacttcagccaacaggattcctgagctgaaatgcagatgaccacattcaaggaagaaccttctgccccagctttgcaggatgaaaagctttcctgcttggcagttattcttccacaagagagggctttctcaggacctggttgctactggttcggcaactgcagaaaatgtcctcccttgtggcttcctcagctcctgcccttggcctgaagtcccagcattgatggcagcgcctcatcttcaacttttgtgctcccctttgcctaaaccgtatggcctcccgtgcatctgtactcaccctgtacgacaaacacattacattattaaatgtttctcaaagatggagttaaatatcatctggtccatttggctccaaagacagaaaatgaaaagaaaaagggaagattattttcctaatagaataatgattttcatgtatatgtcatgagtgtgtgaggtaatgcgtatgttaaatagctggatttagacattccacactatagccatatatcaaaacttcatgctgtacaatataaatatmctatacaatttttacttgtcaattaaaaaagtaatcctaacatttaaaaaggcaatgcataaaaactgagaacagactataacaactgaaacaaactgggcaaacatgagatgagaaaccagccagcaagtcaatcagaactctttcttcatctcgtctacaatattttgtatttataactgtaaattagtgtatagtgtttcactccagagacttcaataatacagtgttatcaaaggacttgtacagatttcagagaaagacacatttagaagatggagagttctccgttatgttctatctgagagtcagtatgaaatgtcaaatctaaaagtacataattcagaggtctatttcaaattaataatcatttgagcataatttctccactgtcagagacgactgttattttattttcaatcaaattaaaagttgtttttatgcatatcttatttttagttatatgttacttgtacatacgtagcagtacaagtgcatataaatcctgtaagagtataatcctatagaaatatattaagctgataattatgtctgttctgtttgatcacagagttgcaacaaataggcctcatttcctaagttgaggaaatgattttct

SEQ ID NO: 28 - DNA, 1228 bp, Homo sapien
ctttgggagctggctctctccataagcttttctggaggaggaacwrtggctttgctgaggacactctggacttcagccaacaggattcctgagctgaaatgcagatgaccacattcaaggaagaaccttctgccccagctttgcaggatgaaaagctttcctgcttggcagttattcttccacaagagagggctttctcaggacctggttgctactggttcggcaactgcagaaaatgtcctcccttgtggcttcctcagctcctgcccttggcctgaagtcccagcattgatggcagcgcctcatcttcaacttttgtgctcccctttgcctaaaccgtatggcctcccgtgcatctgtactcaccctgtacgacaaacacattacattattaaatgtttctcaaagatggagttaaatatcatctggtccatttggctccaaagacagaaaatgaaaagaaaaagggaagattattttcctaatagaataatgattttcatgtatatgtcatgagtgtgtgaggtaatgcgtatgttaaatagctggatttagacattccacactatagccatatatcaaaacttcatgctgtacaatataaatatmctatacaatttttacttgtcaattaaaaaagtaatcctaacatttaaaaaggcaatgcataaaaactgagaacagactataacaactgaaacaaactgggcaaacatgagatgagaaaccagccagcaagtcaatcagaactctttcttcatctcgtctacaatattttgtatttataactgtaaattagtgtatagtgtttcactccagagacttcaataatacagtgttatcaaaggacttgtacagatttcagagaaagacacatttagaagatggagagttctccgttatgttctatctgagagtcagtatgaaatgtcaaatctaaaagtacataattcagaggtctatttcaaattaataatcatttgagcataatttctccactgtcagagacgactgttattttattttcaatcaaattaaaagttgtttttatgcatatcttatttttagttatatgttacttgtacatacgtagcagtacaagtgcatataaatcctgtaagagtataatcctatagaaatatattaagctgataattatgtctgttctgtttgatcacagagttgcaacaaataggcctcatttcctaagttgaggaaatgattttct

SEQ ID NO: 29 - DNA, 2619 bp, Homo sapien
ggggaacacaacttaggctaggtacgaggcctgggtggtcmggctatcggactctccattgccctgcacgtgggttttgacaacttcgagcagctgctctcgggggctcactggatggaccagcacttccgcacgacgcccctggagaagaacgcccccgtcttgctggccctgctgggtatctggtacatcaactgctttgggtgtgagacacacgccatgctgccctatgaccagtacctgcaccgctttgctgcgtacttccagcagggcgacatggagtccaatgggaaatacatcaccaaatctggaacccgtgtggaccaccagacaggccccattgtgtggggggagccagggaccaatggccagcatgctttttaccagctcatccaccaaggcaccaagatgataccctgtgacttcctcatcccggtccagacccagcaccccatacggaagggtctgcatcacaagatcctcctggccaacttcttggcccagacagaggccctgatgaggggaaaatcgacggaggaggcccgaaaggagctccaggctgcgggcaagagtccagaggaccttgagaggctgctgccacataaggtctttgaaggaaatcgcccaaccaactctattgtgttcaccaagctcacaccattcatgcttggagccttggtcgccatgtatgagcacaagatcttcgttcagggcatcatctgggacatcaacagctttgaccagtggggagtggagctgggaaagcagctggctaagaaaatagagcctgagcttgatggcagtgctcaagtgacctctcacgacgcttctaccaatgggctcatcaacttcatcaagcagcagcgcgaggccagagtccaataaactcgtgctcatctgcagcctcctctgtgactcccctttctcttctcgtccctcctccccggagccggcactgcatgttcctggacaccacccagagcaccctctggttgtgggcttggaccacgagcccttagcagggaaggctggtctcccccagcctaacccccagcccctccatgtctatgctccctctgtgttagaattggctgaagtgtttttgtgcagctgacttttctgacccatgttcacgttgttcacatcccatgtagaaaaataaagatgccacggaggaggttgtaggctcagcctctgattttttttttcctgtgatggtgctttatgtagcagagggcaggagcgctcagcaggacgcaggctgtgcctctgcggacacttaacactaagtggtgagcgggtctagagtggagcaaggtgccctgagaagacaatagtggggtgggggcacaatcagtcaggacggcacagktrcrggctcayrcctgtaatcycagcactttgggaggccraggyaggkggatcacctgaggtcagaccagtctggtcaacatggtgaaaccccgtctgtaccaaaaatacaaaaaccagctgggcatggtggcacctgcctgtggtcccagctactcgggaggccgaggcagaagactcgctggaacccgggaggcggagcttgccgtgagccgagactgtgtcactgcaccgcagcctgggtgacagagccagactccatctcaacaacagacgcacttacacttggagtgtctgtcgcacagggccgaggagcgcatgtcacacaggcggatggtccctttgctactgctgtagacgaacacgttgcactggtgcgggtggaactcggctgcagtgatgacttcggtcagctcctccatgttagcaggcttgatgtccacgatgttaaagcttctatctgtgatttctaagtgccataaattaattctcaggtcatctgcagaaagatatgtttcatgatcactatttactgaaatggaatttatatgatatgtgtgagcatttgcaaaaattcgccgtggactcgcttctaccataagatccatgggcttcaatattgggacccgtagcgccgtgatcctaaatgggtctcgaagtcttccatcttcgtctttcaggttataaccttctgctcttttatcccgttcacttattttccataattttatagttttatcatttgtagacagtagaaaatgagcagcattctgttgtggtaaccacctaattttattaattttttcctcaatttctagacttttcaaatagtcaaactccggttcatgactttgaaaggtgctgtaaacattatattctcccctagaatgagggcggcttttattctcttgttcacgctgaaaaataacaactctgccgcccttgtctcctgttgcaagaagatctccagagtaattaaactcaacggtggaaatgatgtccgcttcggccacgtcctcgtcgatggcccccttgacctgcgagaagcaccactggaagtcgttgccgcccgcggggcagccgccgcctccggctcctgccatggcagccggcggcgggacgggcggggaccgcggcagaccagggagacggcctccgcgccgctgcagccgagcgctcagccccggggccgccaccaccgccggcgccgccgccgccgccgccgccgccggggagggatyttyykct

SEQ ID NO: 30 - DNA, 2564 bp, Homo sapien
  misc_feature (554)..(554): n=a, c, g or t
actggtgtgtagttcttaaagagcagttatcactgttccctgccttgtggtgtcatcggatgtgtccccctcgctccaactgagctgtacagcgagtgacccaggctgggactgacccctgctgagaagtaccaggcggtcttgtccctctgcctgaagcccagacagtgctctcaagcataactgatgtctcgctcatcagatcctcctggccaacttcttggcccagacagaggccctgatgaggggaaaatcgacggaggaggcccgaaaggagctccaggctgcgggcaagagtccagaggaccttgagaggctgctgccacataaggtcagcacttctgcatttggctttggggtgcatgctggagttggaggtgtgaagctatggcaccaggcaggggcttggggcatgcctggcttgtcctacagaatgggagggcctgtcctcacagacctgcacgtctcagcctctggggcagggtgtgcttcccttcaaggggtttagggatcaggactctcttggagacattccttggtgttttctgcaggtntttgaaggaaatcgcccaaccaactctattgtgttcaccaagctcacaccattcatgcttggagccttggtcgccatgtatgagcacaagatcttcgttcagggcatcatctgggacatcaacagctttgaccagtggggagtggagctgggaaagcagctggctaagaaaatagagcctgagcttgatggcagtgctcaagtgacctctcacgacgcttctaccaatgggctcatcaacttcatcaagcagcagcgcgaggccagagtccaataaactcgtgctcatctgcagcctcctctgtgactcccctttctcttctcgtccctcctccccggagccggcactgcatgttcctggacaccacccagagcaccctctggttgtgggcttggaccacgagcccttagcagggaaggctggtctcccccagcctaacccccagcccctccatgtctatgctccctctgtgttagaattggctgaagtgtttttgtgcagctgacttttctgacccatgttcacgttgttcacatcccatgtagaaaaataaagatgccacggaggaggttgtaggctcagcctctgattttttttttcctgtgatggtgctttatgtagcagagggcaggagcgctcagcaggacgcaggctgtgcctctgcggacacttaacactaagtggtgagcgggtctagagtggagcaaggtgccctgagaagacaatagtggggtgggggcacaatcagtcaggacggcacagktrcrggctcayrcctgtaatcycagcactttgggaggccraggyaggkggatcacctgaggtcagaccagtctggtcaacatggtgaaaccccgtctgtaccaaaaatacaaaaaccagctgggcatggtggcacctgcctgtggtcccagctactcgggaggccgaggcagaagactcgctggaacccgggaggcggagcttgccgtgagccgagactgtgtcactgcaccgcagcctgggtgacagagccagactccatctcaacaacagacgcacttacacttggagtgtctgtcgcacagggccgaggagcgcatgtcacacaggcggatggtccctttgctactgctgtagacgaacacgttgcactggtgcgggtggaactcggctgcagtgatgacttcggtcagctcctccatgttagcaggcttgatgtccacgatgttaaagcttctatctgtgatttctaagtgccataaattaattctcaggtcatctgcagaaagatatgtttcatgatcactatttactgaaatggaatttatatgatatgtgtgagcatttgcaaaaattcgccgtggactcgcttctaccataagatccatgggcttcaatattgggacccgtagcgccgtgatcctaaatgggtctcgaagtcttccatcttcgtctttcaggttataaccttctgctcttttatcccgttcacttattttccataattttatagttttatcatttgtagacagtagaaaatgagcagcattctgttgtggtaaccacctaattttattaattttttcctcaatttctagacttttcaaatagtcaaactccggttcatgactttgaaaggtgctgtaaacattatattctcccctagaatgagggcggcttttattctcttgttcacgctgaaaaataacaactctgccgcccttgtctcctgttgcaagaagatctccagagtaattaaactcaacggtggaaatgatgtccgcttcggccacgtcctcgtcgatggcccccttgacctgcgagaagcaccactggaagtcgttgccgcccgcggggcagccgccgcctccggctcctgccatggcagccggcggcgggacgggcggggaccgcggcagaccagggagacggcctccgcgccgctgcagccgagcgctcagccccggggccgccaccaccgccggcgccgccgccgccgccgccgccgccggggagggatyttyykct

SEQ ID NO: 31 - DNA, 5718 bp, Homo sapien
catcaatgaaaactgtgctcagcattaaccttcagaagctgatgacactgttctactttaagcaggaaagagaagttttctccgcacctgttgagggcacgtcttcctccgcgcctgttgagggcacttctctaaagtgaatggatcctgctttttgcggacataggtgcgtggaattgccagcgcctctcagaacatcaagactgcactggggagaacccacagaaacggacaggactgctggccaggtggcttcccccgcaggcgccccagagctaggtgacgacacctccagggaacgtgcgccgcagacctcaaggcagtggcagttccacgggagcagcagtgccacgtggaacctctacacacgggacccgcctgggctgcaccttctgctctgccctgggggtggaggaggtgggctatttagtgggaaatacattctagaggaagatggaaaagggtgtccaaatacgcagtgaaaatccagttaaacatttaaaatttattgaactttttggtcaaaatagttgaacaaatatatacaatcccattttactagaactgtcttaaggaccagggttgactaatgcttaaataactgttccacacctcagactttgtaaattgtgtcacaatcaatatacagtatataaattattttttagttaaaataaaggtacctttagattctcaatttctaacttaatgtgaactcaagtggcactgtgttagcattgattcagggtaatgacggacatcctgttcttgcccatgtggattagtaatcagcacacaccttcatctccacagggggatgggggatcagcacacaccttcatctccacagggggaccggggatcagcacacgccttcatctccacagggggatgggggatcagcacacaccttcatctccacagtgggatggcggatcagcacacgccttcatctccacagggggatgggggatgagcacacgccttcatctccacagggggatggcggatcagcacacgccttcatctccacagggggacggcggatcagcacacgccttcatctccacagggggacgggggatcagcacacgccttcatctccacaggaggacgggggatcagcacacaccttcatctccacagggggaccggggatcagcacacaccttcatctccacagggggatgggggatcagcacacaccttcatctccacagggggatgggggatcagcacacgccttcatctccacagggggatgggggatcagcacacgccttcatctccacagggggatgggggatcagcacacgccttcatctccacagtgggatggcggatcagcacacgccttcatctccacagggggatgggggatcagcacacaccttcatctccacagggggatgggggatcagcacacgccttcatctccacagtgggatggcggatcagcacacgccttcatctccacagggggatgggggatcagcacacgccttcatctccacagtgggacgggggatcagcacacacctccatctccacagggggacgggggaccagcacacacctccatctccacaggggcacgaggaagcagcacacaccttcatctccacaggaggacgggggatcagcacacatcttcatctccacagggggatgggggatcagcacacacctccatctccacagggggacaagagatcagcacacaccttcatccccacagggggacaggggatcagcataccccttcatctccacagggggatgggggatcagcacacaccttcatctccacagggggacgggggatcagcataccccttcatctccacagggggatgggggatcagcacacaccttcatccccacagggggatgggggatcagcacacacctccatctccacaggggcatgaggaatcagcacacaccttcatctccacaggaagacgggggatcagcacaccccttcatctccacagggggatgggggatcagcacacaccttcatctccacagggggacgggggatcagcagtacacaccttcatctagataggggaacaggggatcagtacacacctctatctccacaggggcacgagggatcagcacacacctccatctccacagggcatgggggatcagcacaccccttcatctccacagggggacggggatcagcacacaccttcatctccacagggggacgggggatcaacacaccccttcatctccacatggggatgggggatcagcacacaccttcatctccacagggggacgggggatcagcacacgcctccatgtccacaggggcacgggggatcagcacaccccttcatcttcacagggagatgggggatcagcacacaccttcatctccacagggggacggggatcagcacacaccatctccacagggggacaggggatcaacacaccccttcatctccacatggggatgggggatcagcacacaccttcatctccacagggggatggggatcagcacacgcctccatctccacaggggcgcgggggattggcacaccccttcatctccacagggagatgggggatcagcacacaccttcatctccacagggggacgggggatcagcacaccccttcatctccacagtgggacaggggatcagcatatcccttcatctccacagggggatggggatcagcacacaccttcatctccacagggagatgggggatcagcacgcaccttcatctccacaggggcacgggggatcagcacacaccttcatctccacagggggacgggggatcagcacacaccttcatccagacaggggcatgaggaatcagcacacaccttcatctagacagggggatgggatgggggatcagcacacacctccatctccacaggggcacgagggagcagcacacacctccatctccacagggcacaggggatcagcacacacctccttctccacaggggcacaggcaatcagcacataccttcatctagacagggtgacgggcgatcagcacacacctccatctccacagcagcaggaggaatcaacacacaccttcatctccacaggcggacgggggatcagcacacacctccatctccacaggggcacgggagcccgactccccactcccctcggggacacgtagtgggcgtgtgttaaatcccacggaagcaagctctggtcactcagcattggtacagctctgtattatttgtcttggaaaatcttgatttctggtatcaaagatcctactttgaaaataaaccaacgtactggtggcatcgtgtaattaaaattgcttaattttgctggcttgaaatgcaggatgaaatttagcatgcatgtaattttagcaatgtttaaaaagtatactttccccaaagtgctttttcaaaagccttagaaagcaagcacgtatttcttcaactgtagtgaatttgaagctactttaaaccaggcttactggatggcagcaattttggttcttccttgcaattttctttctcagaggtggcctcggttctggcttttcccagaccttacctggtgtatctgatgggctacttctacagaaacacagcgggcagcagcttggggacagaaatgctgcacacatacccccacgctgccaaagaaggacacacatttctcaaacagttagttccaaagaagaaccctgcataacttcattctatgcaataaaattaaataaaaagacaatacttctgtttggatttaaaaacactttatagtgtgttgtttttattgagcgctcacacccgaaggggtggcggcggatgctgtgggagtggagctgggaaagcagctggctaagaaaatagagcctgagcttgatggcagtgctcaagtgacctctcacgacgcttctaccaatgggctcatcaacttcatcaagcagcagcgcgaggccagagtccaataaactcgtgctcatctgcagcctcctctgtgactcccctttctcttctcgtccctcctccccggagccggcactgcatgttcctggacaccacccagagcaccctctggttgtgggcttggaccacgagcccttagcagggaaggctggtctcccccagcctaacccccagcccctccatgtctatgctccctctgtgttagaattggctgaagtgtttttgtgcagctgacttttctgacccatgttcacgttgttcacatcccatgtagaaaaataaagatgccacggaggaggttgtaggctcagcctctgattttttttttcctgtgatggtgctttatgtagcagagggcaggagcgctcagcaggacgcaggctgtgcctctgcggacacttaacactaagtggtgagcgggtctagagtggagcaaggtgccctgagaagacaatagtggggtgggggcacaatcagtcaggacggcacagktrcrggctcayrcctgtaatcycagcactttgggaggccraggyaggkggatcacctgaggtcagaccagtctggtcaacatggtgaaaccccgtctgtaccaaaaatacaaaaaccagctgggcatggtggcacctgcctgtggtcccagctactcgggaggccgaggcagaagactcgctggaacccgggaggcggagcttgccgtgagccgagactgtgtcactgcaccgcagcctgggtgacagagccagactccatctcaacaacagacgcacttacacttggagtgtctgtcgcacagggccgaggagcgcatgtcacacaggcggatggtccctttgctactgctgtagacgaacacgttgcactggtgcgggtggaactcggctgcagtgatgacttcggtcagctcctccatgttagcaggcttgatgtccacgatgttaaagcttctatctgtgatttctaagtgccataaattaattctcaggtcatctgcagaaagatatgtttcatgatcactatttactgaaatggaatttatatgatatgtgtgagcatttgcaaaaattcgccgtggactcgcttctaccataagatccatgggcttcaatattgggacccgtagcgccgtgatcctaaatgggtctcgaagtcttccatcttcgtctttcaggttataaccttctgctcttttatcccgttcacttattttccataattttatagttttatcatttgtagacagtagaaaatgagcagcattctgttgtggtaaccacctaattttattaattttttcctcaatttctagacttttcaaatagtcaaactccggttcatgactttgaaaggtgctgtaaacattatattctcccctagaatgagggcggcttttattctcttgttcacgctgaaaaataacaactctgccgcccttgtctcctgttgcaagaagatctccagagtaattaaactcaacggtggaaatgatgtccgcttcggccacgtcctcgtcgatggcccccttgacctgcgagaagcaccactggaagtcgttgccgcccgcggggcagccgccgcctccggctcctgccatggcagccggcggcgggacgggcggggaccgcggcagaccagggagacggcctccgcgccgctgcagccgagcgctcagccccggggccgccaccaccgccggcgccgccgccgccgccgccgccgccggggagggatyttyykct

SEQ ID NO: 32 - DNA, 1091 bp, Homo sapien
gcctttgcgsgtggcggcgaacgcggagagcacgccatgaaggcctcgggcacgctacgagagtacaaggtagtgggtcgctgcctgcccacccccaaatgccacacgccgcccctctaccgcatgcgaatctttgcgcctaatcatgtcgtcgccaagtcccgcttctggtactttgtatctcagttaaagaagatgaagaagtcttcaggggagattgtctactgtgggcaggtgtttgagaagtcccccctgcgggtgaagaacttcgggatctggctgcgctatgactcccggagcggcacccacaacatgtaccgggaataccgggacctgaccaccgcaggcgctgtcacccagtgctaccgagacatgggtgcccggcaccgcgcccgagcccactccattcagatcatgaaggtggaggagatcgcggccagcaagtgccgccggccggctgtcaagcagttccacgactccaagatcaagttcccgctgccccaccgggtcctgcgccgtcagcacaagccacgcttcaccaccaagaggcccaacaaccttctttctaggtgcagggccctcgtccggggtgtgcccccaaataaactcaggaacgccccgaaggtacaagctgctgttccggatgactttaaggacttcagtctgctgtaacgaggaggcgcgctaatatcagttcaagaccatggtgaggcgagcttggagcgctggcacgcatgacccggagaagagcaccggaaaccgggatggggaacggctggatgccaagtcaagcgccagaagatgggccaagcgggaccggaccacacgacgagcactgcccgcttaagaagaataccacagcaacgcgaaagcaacagtaaggcagaacaaaccgaggcgacaccagagcggcgcgaaagaaaaaaacgcagcacaacgaacacgcggcagcgcaatacgcagcgcgctctaaagagaccgacagaaagcaacccgtcggggacaaccaaggcgagacgaagcccccgggacgcaaacgggagggagaagagcgcaccgcaggtccgaataaagagaggaacagccgacat

SEQ ID NO: 33 - DNA, 859 bp, Homo sapien
acagccgtgttgtcgccaggccgcgccttccctcccacagcgcgcgctgcgcgtgcgaaggtctggcggctcttgggactggcggggctgcgcgcggggttagggtgggggtacgggaaggctcaacccaggacctgcgtaccttgctttgggggcgcactaagcacctgccgggagcagggggcgcaccgggaactcgcagatttcgccagttgggcgcactggggatctgtggactgcgtccgggggatgggctagggggacatgcgcacgctttgggccttacagaatgtgatcgcgcgagggggagggcgaagcgtggcgggagggcgaggcgaaggaaggagggcctcgttcgtccggcccagcctgaccaatgccgcggtggaaacgggcttggagctggccccataagggctggcggcttcctccgacgccgcccctccccacagcttctcgactgcagtggggcggggggcaccaacacttggagatttttccggaggggagaggattttctaagggcacagagaatccattttctacacattaacttgagctgctggagggacactgctggcaaacggagacctatttttgtacaaagaacccttgacctggggcgtaataaagatgacctggacccctgcccccactatctggagttttccatgctggccaagatctggacacgagcagtccctgaggggcggggtccctggcgtgaggcccccgtgacagcccaccctggggtgggtttgtgggcactgctgctctgctagggagaagcctgtgtggggcacacctcttcaagggagcgtgaactttataaataaatcagttctgtttaccaaaaaaa

SEQ ID NO: 34 - DNA, 2236 bp, Homo sapien
ctcacccctaagcccagccctcggctcccacccttgtgtacctgggccgaaccattcaccggagcgcgcagcgggtggagtgtggctcggaggaccgcggcgggtcaagcacctttctcccccatatctgaaagcatgccctttgtccacgtcgtttacgctcattaaaacttccagaatgcaacaggacggacttggagtagggacaaggaacggaagtgggaaggggaggagcgtgcacccctcctggccttggtgcgcgccgcgccccctaaggtactttggaagggacgcgcgggccagacgcgcccagacggccgcgatggcgctgttggccggcgggctctccagagggctgggctcccacccggccgccgcaggccgggacgcggtcgtcttcgtgtggcttctgcttagcacctggtgcacagctcctgccagggccatccaggtgaccgtgtccaacccctaccacgtggtgatcctcttccagcctgtgaccctgccctgtacctaccagatgacctcgacccccacgcaacccatcgtcatctggaagtacaagtctttctgccgggaccgcatcgccgatgccttctccccggccagcgtcgacaaccagctcaatgcccagctggcagccgggaacccaggctacaacccctacgtcgagtgccaggacagcgtgcgcaccgtcagggtcgtggccaccaagcagggcaacgctgtgaccctgggagattactaccagggccggaggattaccatcaccggaaatgctgacctgacctttgaccagacggcgtggggggacagtggtgtgtattactgctccgtggtctcagcccaggacctccaggggaacaatgaggcctacgcagagctcatcgtccttgggaggacctcaggggtggctgagctcttacctggttttcaggcggggcccatagaagactggctcttcgtggttgtggtatgcctggctgccttcctcatcttcctcctcctgggcatctgctggtgccagtgctgcccgcacacttgctgctgctacgtcaggtgcccctgctgcccagacaagtgctgctgccccgaggccctgtatgccgccggcaaagcagccacctcaggtgttcccagcatttatgcccccagcacctatgcccacctgtctcccgccaagaccccacccccaccagctatgattcccatgggccctgcctacaacgggtaccctggaggataccctggagacgttgacaggagtagctcagctggtggccaaggctcctatgtacccctgcttcgggacacggacagcagtgtggcctctgaagtccgcagtggctacaggattcaggccagccagcaggacgactccatgcgggtcctgtactacatggagaaggagctggccaacttcgacccttctcgacctggcccccccagtggccgtgtggagcgggccatgagtgaagtcacctccctccacgaggacgactggcgatctcggccttcccggggccctgccctcaccccgatccgggatgaggagtggggtggccactccccccggagtcccaggggatgggaccaggagcccgccagggagcaggcaggcgggggctggcgggccaggcggccccgggcccgctccgtggacgccctggacgacctcaccccgccgagcaccgccgagtcagggagcaggtctcccacgagtaatggtgggaggagaagccgggcctacatgcccccgcggagccgcagccgggacgacctctatgaccaagacgactcgagggacttcccacgctcccgggacccccactacgacgacttcaggtctcgggagcgccctcctgccgaccccaggtcccaccaccaccgtacccgggaccctcgggacaacggctccaggtccggggacctcccctatgatgggcggctactggaggaggctgtgaggaagaaggggtcggaggagaggaggagaccccacaaggaggaggaggaagaggcctactacccgcccgcgccgcccccgtactcggagaccgactcgcaggcgtcccgagagcgcaggctcaagaagaacttggccctgagtcgggaaagtttagtcgtctgatctgacgttttctacgtagcttttgtatttttttttttaatttgaaggaacactgatgaagccctgccatacccctcccgagtctaataaaacgtataatcacaa

SEQ ID NO: 35 - DNA, 1612 bp, Homo sapien
ggatacttgatttcggcttgtggggacagtggtggacccagcatctgggctttatataaagggcagctttgttgccctgtaaacacacagaccatgggtggccacttcttccagtaagttagctggggagttggaagtttaggtaaaaccttttgattgacaaatgttggcgaattaccatgctgttaaatgaaacattgttctgccaccctggggctgtgggtgcctgcgtgcaccctctgaaaaatcacacaggaagtggggtggggtctctgtgaagctggtgtcccccagcctcagggatgctgcagaaatggaatgaggaccaacagggactcagatgtccaaggaagctctacagcggagaggacggcttgggaaggaggtccaggcccaggtccctccggaacccaatgggtatggggcagcctggctcctgcctcatcccccttctcctgttgattgtgtcctcacagtgtatgccgccggcaaagcagccacctcaggtgttcccagcatttatgcccccagcacctatgcccacctgtctcccgccaagaccccacccccaccagctatgattcccatgggccctgcctacaacgggtaccctggaggataccctggagacgttgacaggagtagctcagctggtggccaaggctcctatgtacccctgcttcgggacacggacagcagtgtggcctctgaagtccgcagtggctacaggattcaggccagccagcaggacgactccatgcgggtcctgtactacatggagaaggagctggccaacttcgacccttctcgacctggcccccccagtggccgtgtggagcgggccatgagtgaagtcacctccctccacgaggacgactggcgatctcggccttcccggggccctgccctcaccccgatccgggatgaggagtggggtggccactccccccggagtcccaggggatgggaccaggagcccgccagggagcaggcaggcgggggctggcgggccaggcggccccgggcccgctccgtggacgccctggacgacctcaccccgccgagcaccgccgagtcagggagcaggtctcccacgagtaatggtgggaggagaagccgggcctacatgcccccgcggagccgcagccgggacgacctctatgaccaagacgactcgagggacttcccacgctcccgggacccccactacgacgacttcaggtctcgggagcgccctcctgccgaccccaggtcccaccaccaccgtacccgggaccctcgggacaacggctccaggtccggggacctcccctatgatgggcggctactggaggaggctgtgaggaagaaggggtcggaggagaggaggagaccccacaaggaggaggaggaagaggcctactacccgcccgcgccgcccccgtactcggagaccgactcgcaggcgtcccgagagcgcaggctcaagaagaacttggccctgagtcgggaaagtttagtcgtctgatctgacgttttctacgtagcttttgtatttttttttttaatttgaaggaacactgatgaagccctgccatacccctcccgagtctaataaaacgtataatcacaa

SEQ ID NO: 36 - DNA, 6003 bp, Homo sapien
tgacatacgaaaggtttttaatatctacaaaagatgacagactgaaatagtaacattctccaggatggaaagatctatgccacgtaggaattgtttgttcaaattattattttttaaaagccataagctatggagagaataacagagttttgttttgttttttaatcctgatacggtggaagtctggtaggatgggaaccgttcttgaagcttgagaatacattcggaacaaataaaaagtaggaaatgcatacattttgttatttacagttgtagggcaggtaagggcaaaacgtattgataaactcaaagaattttaagaatgatattgtcatgagccatgagccatggaagctgcaaggtttgggctccctcctgccatcgggtggggggtgtcggcggaagggggtacgtgtcctgtcctctcccagtgcttatttcctgctggaaccgtggttttgacgcagccgtgacagcccttcatccttattaaaatcacacaatgaagcaggtcgcccaagattgaaagcgcgtttccagggcggaccccggtccccgcctttggccagcaaaagtacattctggcagggagggatctctgagccccgaagtgaggtcatgccagttagcagttagaaaaggaggcatttctcacacttgctaaagagtttgacgcttgtgaaatataaacaggaagcgggagctctccaaggcgacctgaaggaaatacactgccagtttggtcaacttgtgaatgccagttctctaggtcgtcaagggcactgccagttaagactgatcccctaactgcacccgaggctactactcttcgcccagtctcggcagtgaccccatttttttttcaatccttcccacagccaggtcactcagcagtggggtgactgacccgaagcgcagtgggaagggcttacagtcatctctcaactccccgaacttgcagggcaggggagcgcagaggtcagtgaaatccccagccaggccttattttagtcatgagtttccactggctccctcctctgactgtatcagcgctgctcacaccgcgggattggagtttcagctgttttccctgctcccggctgagtgagaaggtcacagagcccggacctttccgggggaggtgggtggggccctccggcagcctaagtgagattgcagagatctggggccgctggaggaggtccttccgccccgggcttggggctttgggttagcttctcccccgcttctctacctaggcatctcggttacaatgaaattaaaaacaaaacacaaagcaacacaagttctcattgtttttcccctctgtcagccagtggcctcgatacaattttcccagggctgcctttcctttattgctcaatttaacctcttcctagaggttctgcaagttcaagggcaggatccgtgtcggattcatcaactagtgcagcgcctagtgcagagcagggggctcaagaaatacgtgtcgaccgcatgattgctaagatttccctgtaacaggcggtttttttttcttgtctctctcatccctcctgccctgggtgcagaccgcgaacagcgccgccgaacttcccaacaggcagggagagggccgatccgggctggcacgccacgtccccggggtctcagtccctgggtcaacgcagagaggctcgcggtccgcggtgctacgacctgagcccggccacgtgaagcgtcacgccctgcgctgctgcagggcaggcgccgccgccgcggttgtgtaacgctgcagccggaggggaggcgaccggggcgcctctgctccggagggggcagaggagggagggagcgccgggcacagcgcccggtatctttctgcgcttgactggccgggaggaagggggtgacactggggcacccagggggctgcgcaaccgggtgcccgcccgcccgcaggttgtgcccaggagcggagctcctgggagcgaggggccctcggctcacaccctccacggtcaggtgcgcgcggcgtgctcggcggcagcctcagctgcccctgcgcttggccgtcggcccgcttcccatggggtgacatccgccccgcccctcggtccctccccaaggcgggcaattcctggacgcgagggtgagcagtgggggcagggaagccaggacggaaagaaaccccagcctctggggaaggctggggggccgggcgactccctccgcagcgcgccggttcctccaagcgggccgggcgggggaggaggaagagggctgggctggagctagcaaggggatattcctctcccggcttgagtcagacgcgggcggatccgtcctcccccgttccctcccaggagacgggaacttacttcatttccctggggcaggttcgcccacgttaccaacttctccccctcccccagcacccccgtcccttccagcttccgcgccccccacccaactgggcaggacccaggtcgtgctgccaccccctcttcggggaaaggcggccgcagccgcagacacctgggggccggggctgggggtgggggctccctagcagccgccggagcgttgtccaacacgtgagactcatgtgatgaagccgggggagggcgggcaggtcgctccttccctccccggcagtggccagacgtgcctggagtcacagggtagaacacgtagctccaacccacccaccgctccctcccgcctccccgcccgccccacttctcattcacttggctcgcacggcgcagacagaccgcgcagggagcacacaccgccagtctgtgcgctgagtcggagccagaggccgcggggacaccgggccatgcacgcccccaactgaagctgcatctcaaagccgaagattccagcagcccaggggatttcaaagagctcagactcagaggaacatctgcggagagacccccgaagccctctccagggcagtcctcatccagacgctccgctagtgcagacaggagcgcgcagtggccccggctcgccgcgccatggagcggatccccagcgcgcaaccaccccccgcctgcctgcccaaagcaccgggactggagcacggagacctaccagggatgtaccctgcccacatgtaccaagtgtacaagtcaagacggggaataaagcggagcgaggacagcaaggtaagcaagtgcacccctagggaccctgcgctcagcccctcgcgcgcgctgagtttccaagaaaagttttctcgctttgaggttggcgaggggatgcagggtgtgggctcggtgcctcttctgagtgacttggaaaagaaagggcagacgatggttctgggtgctactctgctactctgctcctctgccggactgttgctgcggggctgggaggataggcttctcatctccttccccaagcgcccaccgcctccccgtgcgtcttgcaggagacctacaaattgccgcaccggctcatcgagaaaaagagacgtgaccggattaacgagtgcatcgcccagctgaaggatctcctacccgaacatctcaaacttacaactttgggtcacttggaaaaagcagtggttcttgaacttaccttgaagcatgtgaaagcactaacaaacctaattgatcagcagcagcagaaaatcattgccctgcagagtggtttacaagctggtgagctgtcagggagaaatgtcgaaacaggtcaagagatgttctgctcaggtttccagacatgtgcccgggaggtgcttcagtatctggccaagcacgagaacactcgggacctgaagtcttcgcagcttgtcacccacctccaccgggtggtctcggagctgctgcagggtggtacctccaggaagccatcagacccagctcccaaagtgatggacttcaaggaaaaacccagctctccggccaaaggttcggaaggtcctgggaaaaactgcgtgccagtcatccagcggactttcgctcactcgagtggggagcagagcggcagcgacacggacacagacagtggctatggaggagaatcggagaagggcgacttgcgcagtgagcagccgtgcttcaaaagtgaccacggacgcaggttcacgatgggagaaaggatcggcgcaattaagcaagagtccgaagaaccccccacaaaaaagaaccggatgcagctttcggatgatgaaggccatttcactagcagtgacctgatcagctccccgttcctgggcccacacccacaccagcctcctttctgcctgcccttctacctgatcccaccttcagcgactgcctacctgcccatgctggagaagtgctggtatcccacctcagtgccagtgctatacccaggcctcaacgcctctgccgcagccctctctagcttcatgaacccagacaagatctcggctcccttgctcatgccccagagactcccttctcccttgccagctcatccgtccgtcgactcttctgtcttgctccaagctctgaagccaatcccccctttaaacttagaaaccaaagactaaactctctaggggatcctgctgctttgctttccttcctcgctacttcctaaaaagcaacaaaaaagtttttgtgaatgctgcaagattgttgcattgtgtatactgagataatctgaggcatggagagcagattcagggtgtgtgtgtgtgtgtgtgtgtgtgtgtgtatgtgcgtgtgcgtgcacatgtgtgcctgcgtgttggtataggactttaaagctccttttggcatagggaagtcacgaaggattgcttgacatcaggagacttgggggggattgtagcagacgtctgggcttttccccacccagagaatagcccccttcgatacacatcagctggattttcaaaagcttcaaagtcttggtctgtgagtcactcttcagtttgggagctgggtctgtggctttgatcagaaggtactttcaaaagagggctttccagggctcagctcccaaccagctgttaggaccccacccttttgcctttattgtcgacgtgactcaccagacgtcggggagagagagcagtcagaccgagctttctgctaacatggggaggtagcaggcactggcatagcacggtagtggtttggggaggtttccgcaggtctgctccccacccctgcctcggaagaataaagagaatgtagttccctactcaggctttcgtagtgattagcttactaaggaactgaaaatgggccccttgtacaagctgagctgccccggagggagggaggagttccctgggcttctggcacctgtttctaggcctaaccattagtacttactgtgcagggaaccaaaccaaggtctgagaaatgcggacaccccgagcgagcaccccaaagtgcacaaagctgagtaaaaagctgcccccttcaaacagaactagactcagttttcaattccatcctaaaactccttttaaccaagcttagcttctcaaaggcctaaccaagccttggcaccgccagatcctttctgtaggctaattcctcttgcccaacggcatatggagtgtccttattgctaaaaaggattccgtctccttcaaagaagttttatttttggtccagagtacttgttttcccgatgtgtccagccagctccgcagcagcttttcaaaatgcactatgcctgattgctgatcgtgttttaactttttcttttcctgtttttattttggtattaagtcgttgcctttatttgtaaagctgttataaatatatattatataaatatattaaaaaggaaaatgtttcagatgtttatttgtataattacttgattcacacagtgagaaaaaatgaatgtattcctgtttttgaagagaagaataattttttttttctctagggagaggtacagtgtttatattttggagccttcctgaaggtgtaaaattgtaaatatttttatctatgagtaaatgttaagtagttgttttaaaatacttaataaaataattcttttcctgtggaa

SEQ ID NO: 37 - DNA, 5871 bp, Homo sapien
tgacatacgaaaggtttttaatatctacaaaagatgacagactgaaatagtaacattctccaggatggaaagatctatgccacgtaggaattgtttgttcaaattattattttttaaaagccataagctatggagagaataacagagttttgttttgttttttaatcctgatacggtggaagtctggtaggatgggaaccgttcttgaagcttgagaatacattcggaacaaataaaaagtaggaaatgcatacattttgttatttacagttgtagggcaggtaagggcaaaacgtattgataaactcaaagaattttaagaatgatattgtcatgagccatgagccatggaagctgcaaggtttgggctccctcctgccatcgggtggggggtgtcggcggaagggggtacgtgtcctgtcctctcccagtgcttatttcctgctggaaccgtggttttgacgcagccgtgacagcccttcatccttattaaaatcacacaatgaagcaggtcgcccaagattgaaagcgcgtttccagggcggaccccggtccccgcctttggccagcaaaagtacattctggcagggagggatctctgagccccgaagtgaggtcatgccagttagcagttagaaaaggaggcatttctcacacttgctaaagagtttgacgcttgtgaaatataaacaggaagcgggagctctccaaggcgacctgaaggaaatacactgccagtttggtcaacttgtgaatgccagttctctaggtcgtcaagggcactgccagttaagactgatcccctaactgcacccgaggctactactcttcgcccagtctcggcagtgaccccatttttttttcaatccttcccacagccaggtcactcagcagtggggtgactgacccgaagcgcagtgggaagggcttacagtcatctctcaactccccgaacttgcagggcaggggagcgcagaggtcagtgaaatccccagccaggccttattttagtcatgagtttccactggctccctcctctgactgtatcagcgctgctcacaccgcgggattggagtttcagctgttttccctgctcccggctgagtgagaaggtcacagagcccggacctttccgggggaggtgggtggggccctccggcagcctaagtgagattgcagagatctggggccgctggaggaggtccttccgccccgggcttggggctttgggttagcttctcccccgcttctctacctaggcatctcggttacaatgaaattaaaaacaaaacacaaagcaacacaagttctcattgtttttcccctctgtcagccagtggcctcgatacaattttcccagggctgcctttcctttattgctcaatttaacctcttcctagaggttctgcaagttcaagggcaggatccgtgtcggattcatcaactagtgcagcgcctagtgcagagcagggggctcaagaaatacgtgtcgaccgcatgattgctaagatttccctgtaacaggcggtttttttttcttgtctctctcatccctcctgccctgggtgcagaccgcgaacagcgccgccgaacttcccaacaggcagggagagggccgatccgggctggcacgccacgtccccggggtctcagtccctgggtcaacgcagagaggctcgcggtccgcggtgctacgacctgagcccggccacgtgaagcgtcacgccctgcgctgctgcagggcaggcgccgccgccgcggttgtgtaacgctgcagccggaggggaggcgaccggggcgcctctgctccggagggggcagaggagggagggagcgccgggcacagcgcccggtatctttctgcgcttgactggccgggaggaagggggtgacactggggcacccagggggctgcgcaaccgggtgcccgcccgcccgcaggttgtgcccaggagcggagctcctgggagcgaggggccctcggctcacaccctccacggtcaggtgcgcgcggcgtgctcggcggcagcctcagctgcccctgcgcttggccgtcggcccgcttcccatggggtgacatccgccccgcccctcggtccctccccaaggcgggcaattcctggacgcgagggtgagcagtgggggcagggaagccaggacggaaagaaaccccagcctctggggaaggctggggggccgggcgactccctccgcagcgcgccggttcctccaagcgggccgggcgggggaggaggaagagggctgggctggagctagcaaggggatattcctctcccggcttgagtcagacgcgggcggatccgtcctcccccgttccctcccaggagacgggaacttacttcatttccctggggcaggttcgcccacgttaccaacttctccccctcccccagcacccccgtcccttccagcttccgcgccccccacccaactgggcaggacccaggtcgtgctgccaccccctcttcggggaaaggcggccgcagccgcagacacctgggggccggggctgggggtgggggctccctagcagccgccggagcgttgtccaacacgtgagactcatgtgatgaagccgggggagggcgggcaggtcgctccttccctccccggcagtggccagacgtgcctggagtcacagggtagaacacgtagctccaacccacccaccgctccctcccgcctccccgcccgccccacttctcattcacttggctcgcacggcgcagacagaccgcgcagggagcacacaccgccagtctgtgcgctgagtcggagccagaggccgcggggacaccgggccatgcacgcccccaactgaagctgcatctcaaagccgaagattccagcagcccaggggatttcaaagagctcagactcagaggaacatctgcggagagacccccgaagccctctccagggcagtcctcatccagacgctccgctagtgcagacaggagcgcgcagtggccccggctcgccgcgccatggagcggatccccagcgcgcaaccaccccccgcctgcctgcccaaagcaccgggactggagcacggagacctaccagggatgtaccctgcccacatgtaccaagtgtacaagtcaagacggggaataaagcggagcgaggacagcaaggtaagcaagtgcacccctagggaccctgcgctcagcccctcgcgcgcgctgagtttccaagaaaagttttctcgctttgaggataggcttctcatctccttccccaagcgcccaccgcctccccgtgcgtcttgcaggagacctacaaattgccgcaccggctcatcgagaaaaagagacgtgaccggattaacgagtgcatcgcccagctgaaggatctcctacccgaacatctcaaacttacaactttgggtcacttggaaaaagcagtggttcttgaacttaccttgaagcatgtgaaagcactaacaaacctaattgatcagcagcagcagaaaatcattgccctgcagagtggtttacaagctggtgagctgtcagggagaaatgtcgaaacaggtcaagagatgttctgctcaggtttccagacatgtgcccgggaggtgcttcagtatctggccaagcacgagaacactcgggacctgaagtcttcgcagcttgtcacccacctccaccgggtggtctcggagctgctgcagggtggtacctccaggaagccatcagacccagctcccaaagtgatggacttcaaggaaaaacccagctctccggccaaaggttcggaaggtcctgggaaaaactgcgtgccagtcatccagcggactttcgctcactcgagtggggagcagagcggcagcgacacggacacagacagtggctatggaggagaatcggagaagggcgacttgcgcagtgagcagccgtgcttcaaaagtgaccacggacgcaggttcacgatgggagaaaggatcggcgcaattaagcaagagtccgaagaaccccccacaaaaaagaaccggatgcagctttcggatgatgaaggccatttcactagcagtgacctgatcagctccccgttcctgggcccacacccacaccagcctcctttctgcctgcccttctacctgatcccaccttcagcgactgcctacctgcccatgctggagaagtgctggtatcccacctcagtgccagtgctatacccaggcctcaacgcctctgccgcagccctctctagcttcatgaacccagacaagatctcggctcccttgctcatgccccagagactcccttctcccttgccagctcatccgtccgtcgactcttctgtcttgctccaagctctgaagccaatcccccctttaaacttagaaaccaaagactaaactctctaggggatcctgctgctttgctttccttcctcgctacttcctaaaaagcaacaaaaaagtttttgtgaatgctgcaagattgttgcattgtgtatactgagataatctgaggcatggagagcagattcagggtgtgtgtgtgtgtgtgtgtgtgtgtgtgtatgtgcgtgtgcgtgcacatgtgtgcctgcgtgttggtataggactttaaagctccttttggcatagggaagtcacgaaggattgcttgacatcaggagacttgggggggattgtagcagacgtctgggcttttccccacccagagaatagcccccttcgatacacatcagctggattttcaaaagcttcaaagtcttggtctgtgagtcactcttcagtttgggagctgggtctgtggctttgatcagaaggtactttcaaaagagggctttccagggctcagctcccaaccagctgttaggaccccacccttttgcctttattgtcgacgtgactcaccagacgtcggggagagagagcagtcagaccgagctttctgctaacatggggaggtagcaggcactggcatagcacggtagtggtttggggaggtttccgcaggtctgctccccacccctgcctcggaagaataaagagaatgtagttccctactcaggctttcgtagtgattagcttactaaggaactgaaaatgggccccttgtacaagctgagctgccccggagggagggaggagttccctgggcttctggcacctgtttctaggcctaaccattagtacttactgtgcagggaaccaaaccaaggtctgagaaatgcggacaccccgagcgagcaccccaaagtgcacaaagctgagtaaaaagctgcccccttcaaacagaactagactcagttttcaattccatcctaaaactccttttaaccaagcttagcttctcaaaggcctaaccaagccttggcaccgccagatcctttctgtaggctaattcctcttgcccaacggcatatggagtgtccttattgctaaaaaggattccgtctccttcaaagaagttttatttttggtccagagtacttgttttcccgatgtgtccagccagctccgcagcagcttttcaaaatgcactatgcctgattgctgatcgtgttttaactttttcttttcctgtttttattttggtattaagtcgttgcctttatttgtaaagctgttataaatatatattatataaatatattaaaaaggaaaatgtttcagatgtttatttgtataattacttgattcacacagtgagaaaaaatgaatgtattcctgtttttgaagagaagaataattttttttttctctagggagaggtacagtgtttatattttggagccttcctgaaggtgtaaaattgtaaatatttttatctatgagtaaatgttaagtagttgttttaaaatacttaataaaataattcttttcctgtggaa

SEQ ID NO: 38 - DNA, 7742 bp, Homo sapien
tgacatacgaaaggtttttaatatctacaaaagatgacagactgaaatagtaacattctccaggatggaaagatctatgccacgtaggaattgtttgttcaaattattattttttaaaagccataagctatggagagaataacagagttttgttttgttttttaatcctgatacggtggaagtctggtaggatgggaaccgttcttgaagcttgagaatacattcggaacaaataaaaagtaggaaatgcatacattttgttatttacagttgtagggcaggtaagggcaaaacgtattgataaactcaaagaattttaagaatgatattgtcatgagccatgagccatggaagctgcaaggtttgggctccctcctgccatcgggtggggggtgtcggcggaagggggtacgtgtcctgtcctctcccagtgcttatttcctgctggaaccgtggttttgacgcagccgtgacagcccttcatccttattaaaatcacacaatgaagcaggtcgcccaagattgaaagcgcgtttccagggcggaccccggtccccgcctttggccagcaaaagtacattctggcagggagggatctctgagccccgaagtgaggtcatgccagttagcagttagaaaaggaggcatttctcacacttgctaaagagtttgacgcttgtgaaatataaacaggaagcgggagctctccaaggcgacctgaaggaaatacactgccagtttggtcaacttgtgaatgccagttctctaggtcgtcaagggcactgccagttaagactgatcccctaactgcacccgaggctactactcttcgcccagtctcggcagtgaccccatttttttttcaatccttcccacagccaggtcactcagcagtggggtgactgacccgaagcgcagtgggaagggcttacagtcatctctcaactccccgaacttgcagggcaggggagcgcagaggtcagtgaaatccccagccaggccttattttagtcatgagtttccactggctccctcctctgactgtatcagcgctgctcacaccgcgggattggagtttcagctgttttccctgctcccggctgagtgagaaggtcacagagcccggacctttccgggggaggtgggtggggccctccggcagcctaagtgagattgcagagatctggggccgctggaggaggtccttccgccccgggcttggggctttgggttagcttctcccccgcttctctacctaggcatctcggttacaatgaaattaaaaacaaaacacaaagcaacacaagttctcattgtttttcccctctgtcagccagtggcctcgatacaattttcccagggctgcctttcctttattgctcaatttaacctcttcctagaggttctgcaagttcaagggcaggatccgtgtcggattcatcaactagtgcagcgcctagtgcagagcagggggctcaagaaatacgtgtcgaccgcatgattgctaagatttccctgtaacaggcggtttttttttcttgtctctctcatccctcctgccctgggtgcagaccgcgaacagcgccgccgaacttcccaacaggcagggagagggccgatccgggctggcacgccacgtccccggggtctcagtccctgggtcaacgcagagaggctcgcggtccgcggtgctacgacctgagcccggccacgtgaagcgtcacgccctgcgctgctgcagggcaggcgccgccgccgcggttgtgtaacgctgcagccggaggggaggcgaccggggcgcctctgctccggagggggcagaggagggagggagcgccgggcacagcgcccggtatctttctgcgcttgactggccgggaggaagggggtgacactggggcacccagggggctgcgcaaccgggtgcccgcccgcccgcaggttgtgcccaggagcggagctcctgggagcgaggggccctcggctcacaccctccacggtcaggtgcgcgcggcgtgctcggcggcagcctcagctgcccctgcgcttggccgtcggcccgcttcccatggggtgacatccgccccgcccctcggtccctccccaaggcgggcaattcctggacgcgagggtgagcagtgggggcagggaagccaggacggaaagaaaccccagcctctggggaaggctggggggccgggcgactccctccgcagcgcgccggttcctccaagcgggccgggcgggggaggaggaagagggctgggctggagctagcaaggggatattcctctcccggcttgagtcagacgcgggcggatccgtcctcccccgttccctcccaggagacgggaacttacttcatttccctggggcaggttcgcccacgttaccaacttctccccctcccccagcacccccgtcccttccagcttccgcgccccccacccaactgggcaggacccaggtcgtgctgccaccccctcttcggggaaaggcggccgcagccgcagacacctgggggccggggctgggggtgggggctccctagcagccgccggagcgttgtccaacacgtgagactcatgtgatgaagccgggggagggcgggcaggtcgctccttccctccccggcagtggccagacgtgcctggagtcacagggtagaacacgtagctccaacccacccaccgctccctcccgcctccccgcccgccccacttctcattcacttggctcgcacggcgcagacagaccgcgcagggagcacacaccgccagtctgtgcgctgagtcggagccagaggccgcggggacaccgggccatgcacgcccccaactgaagctgcatctcaaagccgaagattccagcagcccaggggatttcaaagagctcagactcagaggaacatctgcggagagacccccgaagccctctccagggcagtcctcatccagacgctccgctagtgcagacaggagcgcgcagtggccccggctcgccgcgccatggagcggatccccagcgcgcaaccaccccccgcctgcctgcccaaagcaccgggactggagcacggagacctaccagggtaagttggcactccttggcccttcaagcctcaactgcagccccatgttatgcgccactctcaacttggagcagctccgggcgcaccgggaggttcttgcccggcagaacgcctgcagccgtgcgcaagcagtcacgacccttcctggtctctcttcctgcaggatgtaccctgcccacatgtaccaagtgtacaagtcaagacggggaataaagcggagcgaggacagcaaggtaagcaagtgcacccctagggaccctgcgctcagcccctcgcgcgcgctgagtttccaagaaaagttttctcgctttgaggttggcgaggggatgcagggtgtgggctcggtgcctcttctgagtgacttggaaaagaaagggcagacgatggttctgggtgctactctgctactctgctcctctgccggactgttgctgcggggctgggaggataggcttctcatctccttccccaagcgcccaccgcctccccgtgcgtcttgcaggagacctacaaattgccgcaccggctcatcgagaaaaagagacgtgaccggattaacgagtgcatcgcccagctgaaggatctcctacccgaacatctcaaacttacagtaagtgagaagctggcccctttccaacccagtcctttgcccagagggcgggcgggtcactcgccgcctgcaggttccgcggggaactgcagaccagactggcggatcagagctggcgggtggctctgcggtggggtcctcctccacagtcctggcgttttctggctgactcatgcaaatgaggcgagaaccacttggacctctccaagttggctccaacaccaactggccttccttttcaggagtttaacttctgactttgggtcacttggaaaaagcagtggttcttgaacttaccttgaagcatgtgaaagcactaacaaacctaattgatcagcagcagcagaaaatcattgccctgcagagtggtttacaagctggtgagtgctgattctggctatgctctctttaagagtttgagtgcaaatagagagcccgtgggctcaacatctgatgtaataaacattactgcaacaaattgcttatgcacgttcattgggggagatgcagttttatctttcctaaaaggtcagacttttcatttgaaatgcattgtgccacctggcatgaatacgtattagtgaaatgataagatattcctgtggcattttagcttgagagtctctgggttctgggagatttccctactcccttttaaaatgccaaggcacctataatttgcattgtgggtgttttacagttggtcttcttagccctctttcattggagaagaaatcatgggtatgccccagcgttttcctgtttctttgcttccttgtcacttggtgtgtggtgtgatcctggcaggatacagcaggagtttttcctgcatttcatgtggttccctgaatagccactaggtatcttggtgaattgcacaatctagcgaaaccactgaagtttcatcattcgtttctactgacttccagataatcggagtcaaccttctaaccttctagtctcacttcttccaaataatactgtacagactggggagaattattctacccactccctcatttcatgcttgtctgccttcctctcgaaggctcgtatgatgaaaattgcaaaaacccagctagtgcttctgcctgtttcctcattcaaaataggaagatggtcatacctaatgtcttgaggatcatggatagaatatgtggagaagacatagaaatagcctaattaaaggtcacagcatgactgcaacttttacaaatcattgaaaataagtttactttaggtgattgttgtttcttcattcttttcctcattttataactatccagcctctgcccattttgccacggtgcaatgttgtatgcattgactcttaggtttataaatacatcagaatgttctttgctgcctcgcttacatggaaaactcacaaaccacctatacaatccaaaagaggggaaacagctcatctcatattaattatggtccatttccatgataggatattatgcaaccattaaaaatcatattttatctgagtgttagtatatggattattttaattatttatacttttcagtgtaattcttctctgagcatactacttttggagttaggaacacaaatcagtaaatgcatttttttttttaacaaaaactaaagcacctggttttttggagtatagtttccaggtgcgccacaggccttctgaaacgttttccttcggatttttctttccccaggtgagctgtcagggagaaatgtcgaaacaggtcaagagatgttctgctcaggtttccagacatgtgcccgggaggtgcttcagtatctggccaagcacgagaacactcgggacctgaagtcttcgcagcttgtcacccacctccaccgggtggtctcggagctgctgcagggtggtacctccaggaagccatcagacccagctcccaaagtgatggacttcaaggaaaaacccagctctccggccaaaggttcggaaggtcctgggaaaaactgcgtgccagtcatccagcggactttcgctcactcgagtggggagcagagcggcagcgacacggacacagacagtggctatggaggagaatcggagaagggcgacttgcgcagtgagcagccgtgcttcaaaagtgaccacggacgcaggttcacgatgggagaaaggatcggcgcaattaagcaagagtccgaagaaccccccacaaaaaagaaccggatgcagctttcggatgatgaaggccatttcactagcagtgacctgatcagctccccgttcctgggcccacacccacaccagcctcctttctgcctgcccttctacctgatcccaccttcagcgactgcctacctgcccatgctggagaagtgctggtatcccacctcagtgccagtgctatacccaggcctcaacgcctctgccgcagccctctctagcttcatgaacccagacaagatctcggctcccttgctcatgccccagagactcccttctcccttgccagctcatccgtccgtcgactcttctgtcttgctccaagctctgaagccaatcccccctttaaacttagaaaccaaagactaaactctctaggggatcctgctgctttgctttccttcctcgctacttcctaaaaagcaacaaaaaagtttttgtgaatgctgcaagattgttgcattgtgtatactgagataatctgaggcatggagagcagattcagggtgtgtgtgtgtgtgtgtgtgtgtgtgtgtatgtgcgtgtgcgtgcacatgtgtgcctgcgtgttggtataggactttaaagctccttttggcatagggaagtcacgaaggattgcttgacatcaggagacttgggggggattgtagcagacgtctgggcttttccccacccagagaatagcccccttcgatacacatcagctggattttcaaaagcttcaaagtcttggtctgtgagtcactcttcagtttgggagctgggtctgtggctttgatcagaaggtactttcaaaagagggctttccagggctcagctcccaaccagctgttaggaccccacccttttgcctttattgtcgacgtgactcaccagacgtcggggagagagagcagtcagaccgagctttctgctaacatggggaggtagcaggcactggcatagcacggtagtggtttggggaggtttccgcaggtctgctccccacccctgcctcggaagaataaagagaatgtagttccctactcaggctttcgtagtgattagcttactaaggaactgaaaatgggccccttgtacaagctgagctgccccggagggagggaggagttccctgggcttctggcacctgtttctaggcctaaccattagtacttactgtgcagggaaccaaaccaaggtctgagaaatgcggacaccccgagcgagcaccccaaagtgcacaaagctgagtaaaaagctgcccccttcaaacagaactagactcagttttcaattccatcctaaaactccttttaaccaagcttagcttctcaaaggcctaaccaagccttggcaccgccagatcctttctgtaggctaattcctcttgcccaacggcatatggagtgtccttattgctaaaaaggattccgtctccttcaaagaagttttatttttggtccagagtacttgttttcccgatgtgtccagccagctccgcagcagcttttcaaaatgcactatgcctgattgctgatcgtgttttaactttttcttttcctgtttttattttggtattaagtcgttgcctttatttgtaaagctgttataaatatatattatataaatatattaaaaaggaaaatgtttcagatgtttatttgtataattacttgattcacacagtgagaaaaaatgaatgtattcctgtttttgaagagaagaataattttttttttctctagggagaggtacagtgtttatattttggagccttcctgaaggtgtaaaattgtaaatatttttatctatgagtaaatgttaagtagttgttttaaaatacttaataaaataattcttttcctgtggaa

SEQ ID NO: 39 - DNA, 5384 bp, Homo sapien
tgacatacgaaaggtttttaatatctacaaaagatgacagactgaaatagtaacattctccaggatggaaagatctatgccacgtaggaattgtttgttcaaattattattttttaaaagccataagctatggagagaataacagagttttgttttgttttttaatcctgatacggtggaagtctggtaggatgggaaccgttcttgaagcttgagaatacattcggaacaaataaaaagtaggaaatgcatacattttgttatttacagttgtagggcaggtaagggcaaaacgtattgataaactcaaagaattttaagaatgatattgtcatgagccatgagccatggaagctgcaaggtttgggctccctcctgccatcgggtggggggtgtcggcggaagggggtacgtgtcctgtcctctcccagtgcttatttcctgctggaaccgtggttttgacgcagccgtgacagcccttcatccttattaaaatcacacaatgaagcaggtcgcccaagattgaaagcgcgtttccagggcggaccccggtccccgcctttggccagcaaaagtacattctggcagggagggatctctgagccccgaagtgaggtcatgccagttagcagttagaaaaggaggcatttctcacacttgctaaagagtttgacgcttgtgaaatataaacaggaagcgggagctctccaaggcgacctgaaggaaatacactgccagtttggtcaacttgtgaatgccagttctctaggtcgtcaagggcactgccagttaagactgatcccctaactgcacccgaggctactactcttcgcccagtctcggcagtgaccccatttttttttcaatccttcccacagccaggtcactcagcagtggggtgactgacccgaagcgcagtgggaagggcttacagtcatctctcaactccccgaacttgcagggcaggggagcgcagaggtcagtgaaatccccagccaggccttattttagtcatgagtttccactggctccctcctctgactgtatcagcgctgctcacaccgcgggattggagtttcagctgttttccctgctcccggctgagtgagaaggtcacagagcccggacctttccgggggaggtgggtggggccctccggcagcctaagtgagattgcagagatctggggccgctggaggaggtccttccgccccgggcttggggctttgggttagcttctcccccgcttctctacctaggcatctcggttacaatgaaattaaaaacaaaacacaaagcaacacaagttctcattgtttttcccctctgtcagccagtggcctcgatacaattttcccagggctgcctttcctttattgctcaatttaacctcttcctagaggttctgcaagttcaagggcaggatccgtgtcggattcatcaactagtgcagcgcctagtgcagagcagggggctcaagaaatacgtgtcgaccgcatgattgctaagatttccctgtaacaggcggtttttttttcttgtctctctcatccctcctgccctgggtgcagaccgcgaacagcgccgccgaacttcccaacaggcagggagagggccgatccgggctggcacgccacgtccccggggtctcagtccctgggtcaacgcagagaggctcgcggtccgcggtgctacgacctgagcccggccacgtgaagcgtcacgccctgcgctgctgcagggcaggcgccgccgccgcggttgtgtaacgctgcagccggaggggaggcgaccggggcgcctctgctccggagggggcagaggagggagggagcgccgggcacagcgcccggtatctttctgcgcttgactggccgggaggaagggggtgacactggggcacccagggggctgcgcaaccgggtgcccgcccgcccgcaggttgtgcccaggagcggagctcctgggagcgaggggccctcggctcacaccctccacggtcaggtgcgcgcggcgtgctcggcggcagcctcagctgcccctgcgcttggccgtcggcccgcttcccatggggtgacatccgccccgcccctcggtccctccccaaggcgggcaattcctggacgcgagggtgagcagtgggggcagggaagccaggacggaaagaaaccccagcctctggggaaggctggggggccgggcgactccctccgcagcgcgccggttcctccaagcgggccgggcgggggaggaggaagagggctgggctggagctagcaaggggatattcctctcccggcttgagtcagacgcgggcggatccgtcctcccccgttccctcccaggagacgggaacttacttcatttccctggggcaggttcgcccacgttaccaacttctccccctcccccagcacccccgtcccttccagcttccgcgccccccacccaactgggcaggacccaggtcgtgctgccaccccctcttcggggaaaggcggccgcagccgcagacacctgggggccggggctgggggtgggggctccctagcagccgccggagcgttgtccaacacgtgagactcatgtgatgaagccgggggagggcgggcaggtcgctccttccctccccggcagtggccagacgtgcctggagtcacagggtagaacacgtagctccaacccacccaccgctccctcccgcctccccgcccgccccacttctcattcacttggctcgcacggcgcagacagaccgcgcagggagcacacaccgccagtctgtgcgctgagtcggagccagaggccgcggggacaccgggccatgcacgcccccaactgaagctgcatctcaaagccgaagattccagcagcccaggggatttcaaagagctcagactcagaggaacatctgcggagagacccccgaagccctctccagggcagtcctcatccagacgctccgctagtgcagacaggagcgcgcagtggccccggctcgccgcgccatggagcggatccccagcgcgcaaccaccccccgcctgcctgcccaaagcaccgggactggagcacggagacctaccagggatgtaccctgcccacatgtaccaagtgtacaagtcaagacggggaataaagcggagcgaggacagcaaggagacctacaaattgccgcaccggctcatcgagaaaaagagacgtgaccggattaacgagtgcatcgcccagctgaaggatctcctacccgaacatctcaaacttacaactttgggtcacttggaaaaagcagtggttcttgaacttaccttgaagcatgtgaaagcactaacaaacctaattgatcagcagcagcagaaaatcattgccctgcagagtggtttacaagctggtgagctgtcagggagaaatgtcgaaacaggtcaagagatgttctgctcaggtttccagacatgtgcccgggaggtgcttcagtatctggccaagcacgagaacactcgggacctgaagtcttcgcagcttgtcacccacctccaccgggtggtctcggagctgctgcagggtggtacctccaggaagccatcagacccagctcccaaagtgatggacttcaaggaaaaacccagctctccggccaaaggttcggaaggtcctgggaaaaactgcgtgccagtcatccagcggactttcgctcactcgagtggggagcagagcggcagcgacacggacacagacagtggctatggaggagaatcggagaagggcgacttgcgcagtgagcagccgtgcttcaaaagtgaccacggacgcaggttcacgatgggagaaaggatcggcgcaattaagcaagagtccgaagaaccccccacaaaaaagaaccggatgcagctttcggatgatgaaggccatttcactagcagtgacctgatcagctccccgttcctgggcccacacccacaccagcctcctttctgcctgcccttctacctgatcccaccttcagcgactgcctacctgcccatgctggagaagtgctggtatcccacctcagtgccagtgctatacccaggcctcaacgcctctgccgcagccctctctagcttcatgaacccagacaagatctcggctcccttgctcatgccccagagactcccttctcccttgccagctcatccgtccgtcgactcttctgtcttgctccaagctctgaagccaatcccccctttaaacttagaaaccaaagactaaactctctaggggatcctgctgctttgctttccttcctcgctacttcctaaaaagcaacaaaaaagtttttgtgaatgctgcaagattgttgcattgtgtatactgagataatctgaggcatggagagcagattcagggtgtgtgtgtgtgtgtgtgtgtgtgtgtgtatgtgcgtgtgcgtgcacatgtgtgcctgcgtgttggtataggactttaaagctccttttggcatagggaagtcacgaaggattgcttgacatcaggagacttgggggggattgtagcagacgtctgggcttttccccacccagagaatagcccccttcgatacacatcagctggattttcaaaagcttcaaagtcttggtctgtgagtcactcttcagtttgggagctgggtctgtggctttgatcagaaggtactttcaaaagagggctttccagggctcagctcccaaccagctgttaggaccccacccttttgcctttattgtcgacgtgactcaccagacgtcggggagagagagcagtcagaccgagctttctgctaacatggggaggtagcaggcactggcatagcacggtagtggtttggggaggtttccgcaggtctgctccccacccctgcctcggaagaataaagagaatgtagttccctactcaggctttcgtagtgattagcttactaaggaactgaaaatgggccccttgtacaagctgagctgccccggagggagggaggagttccctgggcttctggcacctgtttctaggcctaaccattagtacttactgtgcagggaaccaaaccaaggtctgagaaatgcggacaccccgagcgagcaccccaaagtgcacaaagctgagtaaaaagctgcccccttcaaacagaactagactcagttttcaattccatcctaaaactccttttaaccaagcttagcttctcaaaggcctaaccaagccttggcaccgccagatcctttctgtaggctaattcctcttgcccaacggcatatggagtgtccttattgctaaaaaggattccgtctccttcaaagaagttttatttttggtccagagtacttgttttcccgatgtgtccagccagaaccacaaatatcggggtacgagctc

SEQ ID NO: 40 - DNA, 5356 bp, Homo sapien
tgacatacgaaaggtttttaatatctacaaaagatgacagactgaaatagtaacattctccaggatggaaagatctatgccacgtaggaattgtttgttcaaattattattttttaaaagccataagctatggagagaataacagagttttgttttgttttttaatcctgatacggtggaagtctggtaggatgggaaccgttcttgaagcttgagaatacattcggaacaaataaaaagtaggaaatgcatacattttgttatttacagttgtagggcaggtaagggcaaaacgtattgataaactcaaagaattttaagaatgatattgtcatgagccatgagccatggaagctgcaaggtttgggctccctcctgccatcgggtggggggtgtcggcggaagggggtacgtgtcctgtcctctcccagtgcttatttcctgctggaaccgtggttttgacgcagccgtgacagcccttcatccttattaaaatcacacaatgaagcaggtcgcccaagattgaaagcgcgtttccagggcggaccccggtccccgcctttggccagcaaaagtacattctggcagggagggatctctgagccccgaagtgaggtcatgccagttagcagttagaaaaggaggcatttctcacacttgctaaagagtttgacgcttgtgaaatataaacaggaagcgggagctctccaaggcgacctgaaggaaatacactgccagtttggtcaacttgtgaatgccagttctctaggtcgtcaagggcactgccagttaagactgatcccctaactgcacccgaggctactactcttcgcccagtctcggcagtgaccccatttttttttcaatccttcccacagccaggtcactcagcagtggggtgactgacccgaagcgcagtgggaagggcttacagtcatctctcaactccccgaacttgcagggcaggggagcgcagaggtcagtgaaatccccagccaggccttattttagtcatgagtttccactggctccctcctctgactgtatcagcgctgctcacaccgcgggattggagtttcagctgttttccctgctcccggctgagtgagaaggtcacagagcccggacctttccgggggaggtgggtggggccctccggcagcctaagtgagattgcagagatctggggccgctggaggaggtccttccgccccgggcttggggctttgggttagcttctcccccgcttctctacctaggcatctcggttacaatgaaattaaaaacaaaacacaaagcaacacaagttctcattgtttttcccctctgtcagccagtggcctcgatacaattttcccagggctgcctttcctttattgctcaatttaacctcttcctagaggttctgcaagttcaagggcaggatccgtgtcggattcatcaactagtgcagcgcctagtgcagagcagggggctcaagaaatacgtgtcgaccgcatgattgctaagatttccctgtaacaggcggtttttttttcttgtctctctcatccctcctgccctgggtgcagaccgcgaacagcgccgccgaacttcccaacaggcagggagagggccgatccgggctggcacgccacgtccccggggtctcagtccctgggtcaacgcagagaggctcgcggtccgcggtgctacgacctgagcccggccacgtgaagcgtcacgccctgcgctgctgcagggcaggcgccgccgccgcggttgtgtaacgctgcagccggaggggaggcgaccggggcgcctctgctccggagggggcagaggagggagggagcgccgggcacagcgcccggtatctttctgcgcttgactggccgggaggaagggggtgacactggggcacccagggggctgcgcaaccgggtgcccgcccgcccgcaggttgtgcccaggagcggagctcctgggagcgaggggccctcggctcacaccctccacggtcaggtgcgcgcggcgtgctcggcggcagcctcagctgcccctgcgcttggccgtcggcccgcttcccatggggtgacatccgccccgcccctcggtccctccccaaggcgggcaattcctggacgcgagggtgagcagtgggggcagggaagccaggacggaaagaaaccccagcctctggggaaggctggggggccgggcgactccctccgcagcgcgccggttcctccaagcgggccgggcgggggaggaggaagagggctgggctggagctagcaaggggatattcctctcccggcttgagtcagacgcgggcggatccgtcctcccccgttccctcccaggagacgggaacttacttcatttccctggggcaggttcgcccacgttaccaacttctccccctcccccagcacccccgtcccttccagcttccgcgccccccacccaactgggcaggacccaggtcgtgctgccaccccctcttcggggaaaggcggccgcagccgcagacacctgggggccggggctgggggtgggggctccctagcagccgccggagcgttgtccaacacgtgagactcatgtgatgaagccgggggagggcgggcaggtcgctccttccctccccggcagtggccagacgtgcctggagtcacagggtagaacacgtagctccaacccacccaccgctccctcccgcctccccgcccgccccacttctcattcacttggctcgcacggcgcagacagaccgcgcagggagcacacaccgccagtctgtgcgctgagtcggagccagaggccgcggggacaccgggccatgcacgcccccaactgaagctgcatctcaaagccgaagattccagcagcccaggggatttcaaagagctcagactcagaggaacatctgcggagagacccccgaagccctctccagggcagtcctcatccagacgctccgctagtgcagacaggagcgcgcagtggccccggctcgccgcgccatggagcggatccccagcgcgcaaccaccccccgcctgcctgcccaaagcaccgggactggagcacggagacctaccagggatgtaccctgcccacatgtaccaagtgtacaagtcaagacggggaataaagcggagcgaggacagcaaggagacctacaaattgccgcaccggctcatcgagaaaaagagacgtgaccggattaacgagtgcatcgcccagctgaaggatctcctacccgaacatctcaaacttacaactttgggtcacttggaaaaagcagtggttcttgaacttaccttgaagcatgtgaaagcactaacaaacctaattgatcagcagcagcagaaaatcattgccctgcagagtggtttacaagctggtgagctgtcagggagaaatgtcgaaacaggtcaagagatgttctgctcaggtttccagacatgtgcccgggaggtgcttcagtatctggccaagcacgagaacactcgggacctgaagtcttcgcagcttgtcacccacctccaccgggtggtctcggagctgctgcagggtggtacctccaggaagccatcagacccagctcccaaagtgatggacttcaaggaaaaacccagctctccggccaaaggttcggaaggtcctgggaaaaactgcgtgccagtcatccagcggactttcgctcactcgagtggggagcagagcggcagcgacacggacacagacagtggctatggaggagaatcggagaagggcgacttgcgcagtgagcagccgtgcttcaaaagtgaccacggacgcaggttcacgatgggagaaaggatcggcgcaattaagcaagagtccgaagaaccccccacaaaaaagaaccggatgcagctttcggatgatgaaggccatttcactagcagtgacctgatcagctccccgttcctgggcccacacccacaccagcctcctttctgcctgcccttctacctgatcccaccttcagcgactgcctacctgcccatgctggagaagtgctggtatcccacctcagtgccagtgctatacccaggcctcaacgcctctgccgcagccctctctagcttcatgaacccagacaagatctcggctcccttgctcatgccccagagactcccttctcccttgccagctcatccgtccgtcgactcttctgtcttgctccaagctctgaagccaatcccccctttaaacttagaaaccaaagactaaactctctaggggatcctgctgctttgctttccttcctcgctacttcctaaaaagcaacaaaaaagtttttgtgaatgctgcaagattgttgcattgtgtatactgagataatctgaggcatggagagcagattcagggtgtgtgtgtgtgtgtgtgtgtgtgtgtgtatgtgcgtgtgcgtgcacatgtgtgcctgcgtgttggtataggactttaaagctccttttggcatagggaagtcacgaaggattgcttgacatcaggagacttgggggggattgtagcagacgtctgggcttttccccacccagagaatagcccccttcgatacacatcagctggattttcaaaagcttcaaagtcttggtctgtgagtcactcttcagtttgggagctgggtctgtggctttgatcagaaggtactttcaaaagagggctttccagggctcagctcccaaccagctgttaggaccccacccttttgcctttattgtcgacgtgactcaccagacgtcggggagagagagcagtcagaccgagctttctgctaacatggggaggtagcaggcactggcatagcacggtagtggtttggggaggtttccgcaggtctgctccccacccctgcctcggaagaataaagagaatgtagttccctactcaggctttcgtagtgattagcttactaaggaactgaaaatgggccccttgtacaagctgagctgccccggagggagggaggagttccctgggcttctggcacctgtttctaggcctaaccattagtacttactgtgcagggaaccaaaccaaggtctgagaaatgcggacaccccgagcgagcaccccaaagtgcacaaagctgagtaaaaagctgcccccttcaaacagaactagactcagttttcaattccatcctaaaactccttttaaccaagcttagcttctcaaaggcctaaccaagccttggcaccgccagatcctttctgtaggctaattcctcttgcccaacggcatatggagtgtccttattgctaaaaaggattccgtctccttcaaagaagttttatttttggtccagagtacctcggccgcgaccacgmtaagcc

SEQ ID NO: 41 - DNA, 2176 bp, Homo sapien
cacgtgctcgagctgcttcccgggcagctggagcaggatgatagtgggccaggcgtgacgagcgggcagtgtgctggggtaaaggacctgacaggcctcaggagggacttgcgcttcaggccgggatcaggtgctgtgaagctgcctgtggagctggccttggctttccggaactcctccagcttctgtcggtagtacttgtacccttggctattgggctcatacagaaagctgaatgcctggttctcacggttgttctggagggcaatggtttccacctcgggacccccgtccgctatgaacctggccaacttttctgcaaggttcttgacctcttcgtcctctgggggtgaaactttaagcaggctgtcagtactgggctcaactcaccacacccacaccagcctcctttctgcctgcccttctacctgatcccaccttcagcgactgcctacctgcccatgctggagaagtgctggtatcccacctcagtgccagtgctatacccaggcctcaacgcctctgccgcagccctctctagcttcatgaacccagacaagatctcggctcccttgctcatgccccagagactcccttctcccttgccagctcatccgtccgtcgactcttctgtcttgctccaagctctgaagccaatcccccctttaaacttagaaaccaaagactaaactctctaggggatcctgctgctttgctttccttcctcgctacttcctaaaaagcaacaaaaaagtttttgtgaatgctgcaagattgttgcattgtgtatactgagataatctgaggcatggagagcagattcagggtgtgtgtgtgtgtgtgtgtgtgtgtgtgtatgtgcgtgtgcgtgcacatgtgtgcctgcgtgttggtataggactttaaagctccttttggcatagggaagtcacgaaggattgcttgacatcaggagacttgggggggattgtagcagacgtctgggcttttccccacccagagaatagcccccttcgatacacatcagctggattttcaaaagcttcaaagtcttggtctgtgagtcactcttcagtttgggagctgggtctgtggctttgatcagaaggtactttcaaaagagggctttccagggctcagctcccaaccagctgttaggaccccacccttttgcctttattgtcgacgtgactcaccagacgtcggggagagagagcagtcagaccgagctttctgctaacatggggaggtagcaggcactggcatagcacggtagtggtttggggaggtttccgcaggtctgctccccacccctgcctcggaagaataaagagaatgtagttccctactcaggctttcgtagtgattagcttactaaggaactgaaaatgggccccttgtacaagctgagctgccccggagggagggaggagttccctgggcttctggcacctgtttctaggcctaaccattagtacttactgtgcagggaaccaaaccaaggtctgagaaatgcggacaccccgagcgagcaccccaaagtgcacaaagctgagtaaaaagctgcccccttcaaacagaactagactcagttttcaattccatcctaaaactccttttaaccaagcttagcttctcaaaggcctaaccaagccttggcaccgccagatcctttctgtaggctaattcctcttgcccaacggcatatggagtgtccttattgctaaaaaggattccgtctccttcaaagaagttttatttttggtccagagtacttgttttcccgatgtgtccagccagctccgcagcagcttttcaaaatgcactatgcctgattgctgatcgtgttttaactttttcttttcctgtttttattttggtattaagtcgttgcctttatttgtaaagctgttataaatatatattatataaatatattaaaaaggaaaatgtttcagatgtttatttgtataattacttgattcacacagtgagaaaaaatgaatgtattcctgtttttgaagagaagaataattttttttttctctagggagaggtacagtgtttatattttggagccttcctgaaggtgtaaaattgtaaatatttttatctatgagtaaatgttaagtagttgttttaaaatacttaataaaataattcttttcctgtggaa

SEQ ID NO: 42 - DNA, 1047 bp, Homo sapien
tgatctaaggccaccctctcggggagggagttggggaagctgggttggctgggttggtagctcctacctactgtgtggcaagaaggtatgggtcatgaacagaaccaaggagctgcgctgctacagatgttaccacttctgtggctgctaccccactcctgggccgtccctgaagctcctactccaatgtggccagatgacctgcaaaaccacacattcctgcacacagtgtactgccaggatgggagtcccagtgtgggactctctgaggcctacgacgaggaccagcttttcttcttcgacttttcccagaacactcgggtgcctcgcctgcccgaatttgctgactgggctcaggaacagggagatgctcctgccattttatttgacaaagagttctgcgagtggatgatccagcaaatagggccaaaacttgatgggaaaatcccggtgtccagagggtttcctatcgctgaagtgttcacgctgaagcccctggagtttggcaagcccaacactttggtctgttttgtcagtaatctcttcccacccatgctgacagtgaactggcagcatcattccgtccctgtggaaggatttgggcctacttttgtctcagctgtcgatggactcagcttccaggccttttcttacttaaacttcacaccagaaccttctgacattttctcctgcattgtgactcacgaaattgaccgctacacagcaattgcctattgggtaccccggaacgcactgccctcagatctgctggagaatgtgctgtgtggcgtggcctttggcctgggtgtgctgggcatcatcgtgggcattgttctcatcatctacttccggaagccttgctcaggtgactgattcttccagaccagagtttgatgccagcagcttcggacatccctggggtgtgtgtgtagatttcccacctggggactctgctgtccctgggcttgcatcccagggatcccagagtggcctgcctatcacaaccacatcccttccccccacaaggcaataaatctcatttcttta

SEQ ID NO: 43 - DNA, 871 bp, Homo sapien
ctctgatcgccgatcacctctgagaccaccttgctcataaacaaaatgcccatgttggtcctctgccctggacctgtgacattctggactatttctgtgtttatttgtggccgagctcgagccggccattttatttgacaaagagttctgcgagtggatgatccagcaaatagggccaaaacttgatgggaaaatcccggtgtccagagggtttcctatcgctgaagtgttcacgctgaagcccctggagtttggcaagcccaacactttggtctgttttgtcagtaatctcttcccacccatgctgacagtgaactggcagcatcattccgtccctgtggaaggatttgggcctacttttgtctcagctgtcgatggactcagcttccaggccttttcttacttaaacttcacaccagaaccttctgacattttctcctgcattgtgactcacgaaattgaccgctacacagcaattgcctattgggtaccccggaacgcactgccctcagatctgctggagaatgtgctgtgtggcgtggcctttggcctgggtgtgctgggcatcatcgtgggcattgttctcatcatctacttccggaagccttgctcaggtgactgattcttccagaccagagtttgatgccagcagcttcggccatccaaacagaggatgctcagatttctcacatcctgcccaggatctcctcttagggtagaagaagtctctgggacatccctggggtgtgtgtgtagatttcccacctggggactctgctgtccctgggcttgcatcccagggatcccagagtggcctgcctatcacaaccacatcccttccccccacaaggcaataaatctcatttcttta

SEQ ID NO: 44 - DNA, 2754 bp, Homo sapien
gcgggatggcaggggcgagctccacgccctgtccccgtctaagctaccacctttacttccaccaggctgggaaccagggcttccttggttgtggtcagcaatgagtctggatgacaatttgtcgggcacgagcggtatggaagtggacgaccgcgtgtcggcgctggagcagcggctgcagttacaggaagacgagctggcggtcctaaaggcggcgctggcggatgctctgcgtcgcctgcgggcatgcgaagaacagggagcggcgctacgcgcgcggggcacccccaagggccgggcgcctccgcgcttaggcaccactgcctcggtgtgtcagctcttgaaaggccttcccaccaggacgccccttaatggctcgggacccccgcggcgcgtgggtggctatgccacgtccccatcctctcccaagaaggaggcgacctccgggcgcagcagtgtccgccgctacttgtcaccagagcgcctcgcctcggtgcgccgtgaggacccccgcagccggaccacatcctccagcagcaactgtagcgccaaaaaggaaggcaaaaccaaagaagttatcttcagtgtggaggatggctccgtgaaaatgttcctgaggggccgccctgtgcccatgatgatcccagacgagctggcacccacctacagcctggacacacgctcggagctgccttcttgccggctcaagctggagtgggtctatggctaccgtggccgagactgccgggccaacctttatttgctgcccaccggggagatagtgtactttgtggcctccgtagccgtgctatacagcgtggaggagcagaggcagcgacactacctgggacacaacgatgacatcaaatgcttggccatccacccagatatggtcaccatcgccacgggacaggtggcgggaaccactaaggaagggaagccgctgccgccccacgtgcgcatctgggactcagtttccctctccaccttacacgtgctgggcttgggggtgtttgacagagccgtgtgctgtgtgggcttctccaaatctaatggaggcaacctgctgtgtgcagtggatgaatccaatgatcacatgctctcggtgtgggactgggccaaggagaccaaggtggtggatgtcaagtgctccaatgaggctgtattggtggccaccttccaccccacggaccccactgtgcttatcacctgcgggaaatctcacatctacttctggaccttggaggggggcagcttgagcaagcggcaaggcctctttgagaaacatgagaaaccgaagtatgtgctgtgtgtgacctttttggaaggtggcgacgtggtcacgggggactctggggggaacctctatgtttggggcaaaggtgggaaccgtatcacacaggcggtgctgggcgcccacgacggcggcgtgtttgggctctgcgccctgcgggacgggacgctggtgtctggagggggccgtgatcggcgggtggtcctctggggttctgactacagcaagctgcaggaagtggaggtccctgaggactttggccctgtgcgcaccgtggcagagggccacggagacacactgtacgtggggaccacccgcaattccatcctgcagggctccgtgcacacaggcttctcactgctggtccagggccatgtggaagagctgtggggcctggccacacaccccagtcgggcccagtttgtgacctgcgggcaggataagctggtgcatctatggagctcagattcccaccagcccctgtggagcaggatcatcgaggaccctgcccgctcagccggcttccaccccagtggctctgtcctggctgtgggtacagtgactggcagatggctgctgctggacacggagacccatgacctggtggctatccacacagacggcaatgaacagatctcagtggtcagcttctccccagacggggcgtacctggccgtgggctcccacgacaacttggtgtacgtgtacacggtggaccagggcggccgcaaggtcagccgcctgggcaagtgctcgggccattccagttttatcacccacctggattgggcccaggacagcagctgctttgtcaccaactccggggactatgagattctgtactgggacccggctacctgtaagcagatcaccagtgcggatgctgtgaggaacatggaatgggccacagctacttgtgtcctagggtttggggtgtttgggatctggtctgagggggcggacggcactgatatcaacgctgtggcccgctctcatgatgggaagttgctggcttcagctgatgactttggcaaagttcacctgtttagctacccctgctgtcagcctcgagccctcagccacaagtacggtggacacagcagccatgtgacaaatgtggccttcttgtgggatgacagcatggccctgaccacagggggcaaggacaccagtgtgctacagtggcgggtggtctgatgcggccagggaagagtcaggtgtcagggcaggaattctattttcgggagatgtctattgccgagtagagtaatatatacccagagtatgtctatagcagagggggttatgggggcgggagggtagactgacatacagaagtctctatttatccgggtgggaagagggagtcacatcgctttggggatccattggtgtttggtttggggtgttttttaagttttttcttttatatcatccagaaataaagacacgtacactaa

SEQ ID NO: 45 - DNA, 2309 bp, Homo sapien
ctcggccccgttttcatcggagacctccggggagcggtgggggtggaggaatggtttctccccttttctgaactgaatactaagaccctttttttttctttgtcctttcctgacagcaaaaccaaagaagttatcttcagtgtggaggatggctccgtgaaaatgttcctgaggggccgccctgtgcccatgatgatcccagacgagctggcacccacctacagcctggacacacgctcggagctgccttcttgccggctcaagctggagtgggtctatggctaccgtggccgagactgccgggccaacctttatttgctgcccaccggggagatagtgtactttgtggcctccgtagccgtgctatacagcgtggaggagcagaggcagcgacactacctgggacacaacgatgacatcaaatgcttggccatccacccagatatggtcaccatcgccacgggacaggtggcgggaaccactaaggaagggaagccgctgccgccccacgtgcgcatctgggactcagtttccctctccaccttacacgtgctgggcttgggggtgtttgacagagccgtgtgctgtgtgggcttctccaaatctaatggaggcaacctgctgtgtgcagtggatgaatccaatgatcacatgctctcggtgtgggactgggccaaggagaccaaggtggtggatgtcaagtgctccaatgaggctgtattggtggccaccttccaccccacggaccccactgtgcttatcacctgcgggaaatctcacatctacttctggaccttggaggggggcagcttgagcaagcggcaaggcctctttgagaaacatgagaaaccgaagtatgtgctgtgtgtgacctttttggaaggtggcgacgtggtcacgggggactctggggggaacctctatgtttggggcaaaggtgggaaccgtatcacacaggcggtgctgggcgcccacgacggcggcgtgtttgggctctgcgccctgcgggacgggacgctggtgtctggagggggccgtgatcggcgggtggtcctctggggttctgactacagcaagctgcaggaagtggaggtccctgaggactttggccctgtgcgcaccgtggcagagggccacggagacacactgtacgtggggaccacccgcaattccatcctgcagggctccgtgcacacaggcttctcactgctggtccagggccatgtggaagagctgtggggcctggccacacaccccagtcgggcccagtttgtgacctgcgggcaggataagctggtgcatctatggagctcagattcccaccagcccctgtggagcaggatcatcgaggaccctgcccgctcagccggcttccaccccagtggctctgtcctggctgtgggtacagtgactggcagatggctgctgctggacacggagacccatgacctggtggctatccacacagacggcaatgaacagatctcagtggtcagcttctccccagacggggcgtacctggccgtgggctcccacgacaacttggtgtacgtgtacacggtggaccagggcggccgcaaggtcagccgcctgggcaagtgctcgggccattccagttttatcacccacctggattgggcccaggacagcagctgctttgtcaccaactccggggactatgagattctgtactgggacccggctacctgtaagcagatcaccagtgcggatgctgtgaggaacatggaatgggccacagctacttgtgtcctagggtttggggtgtttgggatctggtctgagggggcggacggcactgatatcaacgctgtggcccgctctcatgatgggaagttgctggcttcagctgatgactttggcaaagttcacctgtttagctacccctgctgtcagcctcgagccctcagccacaagtacggtggacacagcagccatgtgacaaatgtggccttcttgtgggatgacagcatggccctgaccacagggggcaaggacaccagtgtgctacagtggcgggtggtctgatgcggccagggaagagtcaggtgtcagggcaggaattctattttcgggagatgtctattgccgagtagagtaatatatacccagagtatgtctatagcagagggggttatgggggcgggagggtagactgacatacagaagtctctatttatccgggtgggaagagggagtcacatcgctttggggatccattggtgtttggtttggggtgttttttaagttttttcttttatatcatccagaaataaagacacgtacactaa

SEQ ID NO: 46 - DNA, 2312 bp, Homo sapien
ctccacccccggccccgaagctccgccacccgccgccatgagtagctttggagctgggtgagaccctttcgcagaccaccccccatctcctctccgcgctcccggggcttagatctcagcaaaaccaaagaagttatcttcagtgtggaggatggctccgtgaaaatgttcctgaggggccgccctgtgcccatgatgatcccagacgagctggcacccacctacagcctggacacacgctcggagctgccttcttgccggctcaagctggagtgggtctatggctaccgtggccgagactgccgggccaacctttatttgctgcccaccggggagatagtgtactttgtggcctccgtagccgtgctatacagcgtggaggagcagaggcagcgacactacctgggacacaacgatgacatcaaatgcttggccatccacccagatatggtcaccatcgccacgggacaggtggcgggaaccactaaggaagggaagccgctgccgccccacgtgcgcatctgggactcagtttccctctccaccttacacgtgctgggcttgggggtgtttgacagagccgtgtgctgtgtgggcttctccaaatctaatggaggcaacctgctgtgtgcagtggatgaatccaatgatcacatgctctcggtgtgggactgggccaaggagaccaaggtggtggatgtcaagtgctccaatgaggctgtattggtggccaccttccaccccacggaccccactgtgcttatcacctgcgggaaatctcacatctacttctggaccttggaggggggcagcttgagcaagcggcaaggcctctttgagaaacatgagaaaccgaagtatgtgctgtgtgtgacctttttggaaggtggcgacgtggtcacgggggactctggggggaacctctatgtttggggcaaaggtgggaaccgtatcacacaggcggtgctgggcgcccacgacggcggcgtgtttgggctctgcgccctgcgggacgggacgctggtgtctggagggggccgtgatcggcgggtggtcctctggggttctgactacagcaagctgcaggaagtggaggtccctgaggactttggccctgtgcgcaccgtggcagagggccacggagacacactgtacgtggggaccacccgcaattccatcctgcagggctccgtgcacacaggcttctcactgctggtccagggccatgtggaagagctgtggggcctggccacacaccccagtcgggcccagtttgtgacctgcgggcaggataagctggtgcatctatggagctcagattcccaccagcccctgtggagcaggatcatcgaggaccctgcccgctcagccggcttccaccccagtggctctgtcctggctgtgggtacagtgactggcagatggctgctgctggacacggagacccatgacctggtggctatccacacagacggcaatgaacagatctcagtggtcagcttctccccagacggggcgtacctggccgtgggctcccacgacaacttggtgtacgtgtacacggtggaccagggcggccgcaaggtcagccgcctgggcaagtgctcgggccattccagttttatcacccacctggattgggcccaggacagcagctgctttgtcaccaactccggggactatgagattctgtactgggacccggctacctgtaagcagatcaccagtgcggatgctgtgaggaacatggaatgggccacagctacttgtgtcctagggtttggggtgtttgggatctggtctgagggggcggacggcactgatatcaacgctgtggcccgctctcatgatgggaagttgctggcttcagctgatgactttggcaaagttcacctgtttagctacccctgctgtcagcctcgagccctcagccacaagtacggtggacacagcagccatgtgacaaatgtggccttcttgtgggatgacagcatggccctgaccacagggggcaaggacaccagtgtgctacagtggcgggtggtctgatgcggccagggaagagtcaggtgtcagggcaggaattctattttcgggagatgtctattgccgagtagagtaatatatacccagagtatgtctatagcagagggggttatgggggcgggagggtagactgacatacagaagtctctatttatccgggtgggaagagggagtcacatcgctttggggatccattggtgtttggtttggggtgttttttaagttttttcttttatatcatccagaaataaagacacgtacactaa

SEQ ID NO: 47 - DNA, 2826 bp, Homo sapien
ggccagacggtacctagggggatccgggcgcagcaatcctggccctaggattgtgttggggggcttggcaggcggtgtcccgacccccctttctgggcatcctggggatgaccccagcgccgggcccggcgccggccgcctgatgccaggcgagctgagctggggatgctggaacgaagggcgttgctatggcaacgggaggcagggcctggttggggggaccgggcccgggctgggaccgggggggccggcggtggctgtggtggggcgatggcggagcgcggcccggccttctgcggcctgtacgacacgtcctcgctgctgcgatactgcaacgatgacaatttgtcgggcacgagcggtatggaagtggacgaccgcgtgtcggcgctggagcagcggctgcagttacaggaagacgagctggcggtcctaaaggcggcgctggcggatgctctgcgtcgcctgcgggcatgcgaagaacagggagcggcgctacgcgcgcggggcacccccaagggccgggcgcctccgcgcttaggcaccactgcctcggtgtgtcagctcttgaaaggccttcccaccaggacgccccttaatggctcgggacccccgcggcgcgtgggtggctatgccacgtccccatcctctcccaagaaggaggcgacctccgggcgcagcagtgtccgccgctacttgtcaccagagcgcctcgcctcggtgcgccgtgaggacccccgcagccggaccacatcctccagcagcaactgtagcgccaaaaaggaaggcaaaaccaaagaagttatcttcagtgtggaggatggctccgtgaaaatgttcctgaggggccgccctgtgcccatgatgatcccagacgagctggcacccacctacagcctggacacacgctcggagctgccttcttgccggctcaagctggagtgggtctatggctaccgtggccgagactgccgggccaacctttatttgctgcccaccggggagatagtgtactttgtggcctccgtagccgtgctatacagcgtggaggagcagaggcagcgacactacctgggacacaacgatgacatcaaatgcttggccatccacccagatatggtcaccatcgccacgggacaggtggcgggaaccactaaggaagggaagccgctgccgccccacgtgcgcatctgggactcagtttccctctccaccttacacgtgctgggcttgggggtgtttgacagagccgtgtgctgtgtgggcttctccaaatctaatggaggcaacctgctgtgtgcagtggatgaatccaatgatcacatgctctcggtgtgggactgggccaaggagaccaaggtggtggatgtcaagtgctccaatgaggctgtattggtggccaccttccaccccacggaccccactgtgcttatcacctgcgggaaatctcacatctacttctggaccttggaggggggcagcttgagcaagcggcaaggcctctttgagaaacatgagaaaccgaagtatgtgctgtgtgtgacctttttggaaggtggcgacgtggtcacgggggactctggggggaacctctatgtttggggcaaaggtccctgaggactttggccctgtgcgcaccgtggcagagggccacggagacacactgtacgtggggaccacccgcaattccatcctgcagggctccgtgcacacaggcttctcactgctggtccagggccatgtggaagagctgtggggcctggccacacaccccagtcgggcccagtttgtgacctgcgggcaggataagctggtgcatctatggagctcagattcccaccagcccctgtggagcaggatcatcgaggaccctgcccgctcagccggcttccaccccagtggctctgtcctggctgtgggtacagtgactggcagatggctgctgctggacacggagacccatgacctggtggctatccacacagacggcaatgaacagatctcagtggtcagcttctccccagacggggcgtacctggccgtgggctcccacgacaacttggtgtacgtgtacacggtggaccagggcggccgcaaggtcagccgcctgggcaagtgctcgggccattccagttttatcacccacctggattgggcccaggacagcagctgctttgtcaccaactccggggactatgagattctgtactgggacccggctacctgtaagcagatcaccagtgcggatgctgtgaggaacatggaatgggccacagctacttgtgtcctagggtttggggtgtttgggatctggtctgagggggcggacggcactgatatcaacgctgtggcccgctctcatgatgggaagttgctggcttcagctgatgactttggcaaagttcacctgtttagctacccctgctgtcagcctcgagccctcagccacaagtacggtggacacagcagccatgtgacaaatgtggccttcttgtgggatgacagcatggccctgaccacagggggcaaggacaccagtgtgctacagtggcgggtggtctgatgcggccagggaagagtcaggtgtcagggcaggaattctattttcgggagatgtctattgccgagtagagtaatatatacccagagtatgtctatagcagagggggttatgggggcgggagggtagactgacatacagaagtctctatttatccgggtgggaagagggagtcacatcgctttggggatccattggtgtttggtttggggtgttttttaagttttttcttttatatcatccagaaataaagacacgtacactaa

SEQ ID NO: 48 - DNA, 2118 bp, Homo sapien
ctccacccccggccccgaagctccgccacccgccgccatgagtagctttggagctggcaaaaccaaagaagttatcttcagtgtggaggatggctccgtgaaaatgttcctgaggggccgccctgtgcccatgatgatcccagacgagctggcacccacctacagcctggacacacgctcggagctgccttcttgccggctcaagctggagtgggtctatggctaccgtggccgagactgccgggccaacctttatttgctgcccaccggggagatagtgtactttgtggcctccgtagccgtgctatacagcgtggaggagcagaggcagcgacactacctgggacacaacgatgacatcaaatgcttggccatccacccagatatggtcaccatcgccacgggacaggtggcgggaaccactaaggaagggaagccgctgccgccccacgtgcgcatctgggactcagtttccctctccaccttacacgtgctgggcttgggggtgtttgacagagccgtgtgctgtgtgggcttctccaaatctaatggaggcaacctgctgtgtgcagtggatgaatccaatgatcacatgctctcggtgtgggactgggccaaggagaccaaggtggtggatgtcaagtgctccaatgaggctgtattggtggccaccttccaccccacggaccccactgtgcttatcacctgcgggaaatctcacatctacttctggaccttggaggggggcagcttgagcaagcggcaaggcctctttgagaaacatgagaaaccgaagtatgtgctgtgtgtgacctttttggaaggtggcgacgtggtcacgggggactctggggggaacctctatgtttggggcaaaggtgggaaccgtatcacacaggcggtgctgggcgcccacgacggcggcgtgtttgggctctgcgccctgcgggacgggacgctggtgtctggagggggccgtgatcggcgggtggtcctctggggttctgactacagcaagctgcaggaagtggaggtccctgaggactttggccctgtgcgcaccgtggcagagggccacggagacacactgtacgtggggaccacccgcaattccatcctgcagggctccgtgcacacaggcttctcactgctggtccaggaccctgcccgctcagccggcttccaccccagtggctctgtcctggctgtgggtacagtgactggcagatggctgctgctggacacggagacccatgacctggtggctatccacacagacggcaatgaacagatctcagtggtcagcttctccccagacggggcgtacctggccgtgggctcccacgacaacttggtgtacgtgtacacggtggaccagggcggccgcaaggtcagccgcctgggcaagtgctcgggccattccagttttatcacccacctggattgggcccaggacagcagctgctttgtcaccaactccggggactatgagattctgtactgggacccggctacctgtaagcagatcaccagtgcggatgctgtgaggaacatggaatgggccacagctacttgtgtcctagggtttggggtgtttgggatctggtctgagggggcggacggcactgatatcaacgctgtggcccgctctcatgatgggaagttgctggcttcagctgatgactttggcaaagttcacctgtttagctacccctgctgtcagcctcgagccctcagccacaagtacggtggacacagcagccatgtgacaaatgtggccttcttgtgggatgacagcatggccctgaccacagggggcaaggacaccagtgtgctacagtggcgggtggtctgatgcggccagggaagagtcaggtgtcagggcaggaattctattttcgggagatgtctattgccgagtagagtaatatatacccagagtatgtctatagcagagggggttatgggggcgggagggtagactgacatacagaagtctctatttatccgggtgggaagagggagtcacatcgctttggggatccattggtgtttggtttggggtgttttttaagttttttcttttatatcatccagaaataaagacacgtacactaa

SEQ ID NO: 49 - DNA, 2152 bp, Homo sapien
ctccacccccggccccgaagctccgccacccgccgccatgagtagctttggagctggcaaaaccaaagaagttatcttcagtgtggaggatggctccgtgaaaatgttcctgaggggccgccctgtgcccatgatgatcccagacgagctggcacccacctacagcctggacacacgctcggagctgccttcttgccggctcaagctggagtgggtctatggctaccgtggccgagactgccgggccaacctttatttgctgcccaccggggagatagtgtactttgtggcctccgtagccgtgctatacagcgtggaggagcagaggcagcgacactacctgggacacaacgatgacatcaaatgcttggccatccacccagatatggtcaccatcgccacgggacaggtggcgggaaccactaaggaagggaagccgctgccgccccacgtgcgcatctgggactcagtttccctctccaccttacacgtgctgggcttgggggtgtttgacagagccgtgtgctgtgtgggcttctccaaatctaatggaggcaacctgctgtgtgcagtggatgaatccaatgatcacatgctctcggtgtgggactgggccaaggagaccaaggtggtggatgtcaagtgctccaatgaggctgtattggtggccaccttccaccccacggaccccactgtgcttatcacctgcgggaaatctcacatctacttctggaccttggaggggggcagcttgagcaagcggcaaggcctctttgagaaacatgagaaaccgaagtatgtgctgtgtgtgacctttttggaaggtggcgacgtggtcacgggggactctggggggaacctctatgtttggggcaaaggtgggaaccgtatcacacaggcggtgctgggcgcccacgacggcggcgtgtttgggctctgcgccctgcgggacgggacgctggtgtctggagggggccgtgatcggcgggtggtcctctggggttctgactacagcaagctgcaggaagtggaggtccctgaggactttggccctgtgcgcaccgtggcagagggccacggagacacactgtacgtggggaccacccgcaattccatcctgcagggctccgtgcacacaggcttctcactgctggtccagggccatgtggaagagctgtggggcctggccacacaccccagtcgggcccagtttgtgacctgcgggcaggataagctggtgcatctatggagctcagattcccaccagcccctgtggagcaggatcatcgaggaccctgcccgctcagccggcttccaccccagtggctctgtcctggctgtgggtacagtgactggcagatggctgctgctggacacggagacccatgacctggtggctatccacacagacggcaatgaacagatctcagtggtcagcttctccccagggccattccagttttatcacccacctggattgggcccaggacagcagctgctttgtcaccaactccggggactatgagattctgtactgggacccggctacctgtaagcagatcaccagtgcggatgctgtgaggaacatggaatgggccacagctacttgtgtcctagggtttggggtgtttgggatctggtctgagggggcggacggcactgatatcaacgctgtggcccgctctcatgatgggaagttgctggcttcagctgatgactttggcaaagttcacctgtttagctacccctgctgtcagcctcgagccctcagccacaagtacggtggacacagcagccatgtgacaaatgtggccttcttgtgggatgacagcatggccctgaccacagggggcaaggacaccagtgtgctacagtggcgggtggtctgatgcggccagggaagagtcaggtgtcagggcaggaattctattttcgggagatgtctattgccgagtagagtaatatatacccagagtatgtctatagcagagggggttatgggggcgggagggtagactgacatacagaagtctctatttatccgggtgggaagagggagtcacatcgctttggggatccattggtgtttggtttggggtgttttttaagttttttcttttatatcatccagaaataaagacacgtacactaa

SEQ ID NO: 50 - DNA, 1899 bp, Homo sapien
aggctaggtagcgggctgggtgtgaatcggccgaggtcgcccgggacaggtggcgggaaccactaaggaagggaagccgctgccgccccacgtgcgcatctgggactcagtttccctctccaccttacacgtgctgggcttgggggtgtttgacagagccgtgtgctgtgtgggcttctccaaatcttgctccaatgaggctgtattggtggccaccttccaccccacggaccccactgtgcttatcacctgcgggaaatctcacatctacttctggaccttggaggggggcagcttgagcaagcggcaaggcctctttgagaaacatgagaaaccgaagtatgtgctgtgtgtgacctttttggaaggtggcgacgtggtcacgggggactctggggggaacctctatgtttggggcaaaggtgggaaccgtatcacacaggcggtgctgggcgcccacgacggcggcgtgtttgggctctgcgccctgcgggacgggacgctggtgtctggagggggccgtgatcggcgggtggtcctctggggttctgactacagcaagctgcaggaagtggaggtccctgaggactttggccctgtgcgcaccgtggcagagggccacggagacacactgtacgtggggaccacccgcaattccatcctgcagggctccgtgcacacaggcttctcactgctggtccaggatccagcaaccaagagtttaactccaagcacagcagaggggccccaggcccctgctccaactgtgctgcctcctgccactctgattgggggtggcacccttcagggccatgtggaagagctgtggggcctggccacacaccccagtcgggcccagtttgtgacctgcgggcaggataagctggtgcatctatggagctcagattcccaccagcccctgtggagcaggatcatcgaggaccctgcccgctcagccggcttccaccccagtggctctgtcctggctgtgggtacagtgactggcagatggctgctgctggacacggagacccatgacctggtggctatccacacagacggcaatgaacagatctcagtggtcagcttctccccagacggggcgtacctggccgtgggctcccacgacaacttggtgtacgtgtacacggtggaccagggcggccgcaaggtcagccgcctgggcaagtgctcgggccattccagttttatcacccacctggattgggcccaggacagcagctgctttgtcaccaactccggggactatgagattctgtactgggacccggctacctgtaagcagatcaccagtgcggatgctgtgaggaacatggaatgggccacagctacttgtgtcctagggtttggggtgtttgggatctggtctgagggggcggacggcactgatatcaacgctgtggcccgctctcatgatgggaagttgctggcttcagctgatgactttggcaaagttcacctgtttagctacccctgctgtcagcctcgagccctcagccacaagtacggtggacacagcagccatgtgacaaatgtggccttcttgtgggatgacagcatggccctgaccacagggggcaaggacaccagtgtgctacagtggcgggtggtctgatgcggccagggaagagtcaggtgtcagggcaggaattctattttcgggagatgtctattgccgagtagagtaatatatacccagagtatgtctatagcagagggggttatgggggcgggagggtagactgacatacagaagtctctatttatccgggtgggaagagggagtcacatcgctttggggatccattggtgtttggtttggggtgttttttaagttttttcttttatatcatccagaaataaagacacgtacactaa

SEQ ID NO: 51 - DNA, 2951 bp, Homo sapien
ttcctrcggscattgcgsagatttcatctggccaggacactggctgtccacctggcactggtcccgacagaggccgagctggggaaagttratgttcactgggggcaggaaccctccttatctccaggctgcctcccaacctcaggaggccacaagattagcagaaagccacgttgagtcagccagtaacatggagcaactgacaagggaaactgaggactattccaaacaagccctctcactggtgcgcaaggccctgcatgaaggagtcggaagcggaagcggtagcccggacggtgctgtggtgcaagggcttgtggaaaaattggagaaaaccaagtccctggcccagcagttgacaagggaggccactcaagcggaaattgaagcagataggtcttatcagcacagtctccgcctcctggattcagtgtctcggcttcagggagtcagtgatcagtcctttcaggtggaagaagcaaagaggatcaaacaaaaagcggattcactctcaagcctggtaaccaggcatatggatgagttcaagcgtacacagaagaatctgggaaactggaaagaagaagcacagcagctcttacagaatggaaaaagtgggagagagaaatcagatcagctgctttcccgtgccaatcttgctaaaagcagagcacaagaagcactgagtatgggcaatgccactttttatgaagttgagagcatccttaaaaacctcagagagtttgacctgcaggtggacaacagaaaagcagaagctgaagaagccatgaagagactctcctacatcagccagaaggtttcagatgccagtgacaagacccagcaagcagaaagagccctggggagcgctgctgctgatgcacagagggcaaagaatggggccggggaggccctggaaatctccagtgagattgaacaggagattgggagtctgaacttggaagccaatgtgacagcagatggagccttggccatggaaaagggactggcctctctgaagagtgagatgagggaagtggaaggagagctggaaaggaaggagctggagtttgacacgaatatggatgcagtacagatggtgattacagaagcccagaaggttgataccagagccaagaacgctggggttacaatccaagacacactcaacacattagacggcctcctgcatctgatggaccagcctctcagtgtagatgaagaggggctggtcttactggagcagaagctttcccgagccaagacccagatcaacagccaactgcggcccatgatgtcagagctggaagagagggcacgtcagcagaggggccacctccatttgctggagacaagcatagatgggattctggctgatgtgaagaacttggagaacattagggacaacctgcccccaggctgctacaatacccaggctcttgagcaacagtgaagctgccataaatatttctcaactgaggttcttgggatacagatctcagggctcgggagccatgtcatgtgagtgggtgggatggggacatttgaacatgtttaatgggtatgctcaggtcaactgacctgaccccattcctgatcccatggccaggtggttgtcttattgcaccatactccttgcttcctgatgctgggcaatgaggcagatagcactgggtgtgagaatgatcaaggatctggaccccaaagaatagactggatggaaagacaaactgcacaggcagatgtttgcctcataatagtcgtaagtggagtcctggaatttggacaagtgctgttgggatatagtcaacttattctttgagtaatgtgactaaaggaaaaaactttgactttgcccaggcatgaaattcttcctaatgtcagaacagagtgcaacccagtcacactgtggccagtaaaatactattgcctcatattgtcctctgcaagcttcttgctgatcagagttcctcctacttacaacccagggtgtgaacatgttctccattttcaagctggaagaagtgagcagtgttggagtgaggacctgtaaggcaggcccattcagagctatggtgcttgctggtgcctgccaccttcaagttctggacctgggcatgacatcctttcttttaatgatgccatggcaacttagagattgcatttttattaaagcatttcctaccagcaaagcaaatgttgggaaagtatttactttttcggtttcaaagtgatagaaaagtgtggcttgggcattgaaagaggtaaaattctctagatttattagtcctaattcaatcctacttttcgaacaccaaaaatgatgcgcatcaatgtattttatcttattttctcaatctcctctctctttcctccacccataataagagaatgttcctactcacacttcagctgggtcacatccatccctccattcatccttccatccatctttccatccattacctccatccatccttccaacatatatttattgagtacctactgtgtgccaggggctggtgggacagtggtgacatagtctctgccctcatagagttgattgtctagtgaggaagacaagcatttttaaaaaataaatttaaacttacaaactttgtttgtcacaagtggtgtttattgcaataaccgcttggtttgcaacctctttgctcaacagaacatatgttgcaagaccctcccatgggggcacttgagttttggcaaggctgacagagctctgggttgtgcacatttctttgcattccagctgtcactctgtgcctttctacaactgattgcaacagactgttgagttatgataacaccagtgggaattgctggaggaaccagaggcacttccaccttggctgggaagactatggtgctgccttgcttctgtatttccttggattttcctgaaagtgtttttaaataaagaacaattgttagat

SEQ ID NO: 52 - DNA, 3643 bp, Homo sapien
tgccggaaacagaataatggcgtctcgtagccccaggcgacagcgtggaggggcgggtctgtcgattggatgaacgcagctgagattactcccagccactaaggacgaagaggtggggcggtggcgtcccacgcctcgtgcgacagtgggcggggctttgttgcctgagtaaccgtatgatggtggtggtggtggtgtcttcctgtctcaacgatacctattttctagtgctgagatcctgagacaatgagtggtatgatccaaatgcttcacttcttcgacgttatgagcttttattttacccaggggatggatctgttgaaatgcatgatgtaaagaatcatcgcacctttttaaagcggaccaaatatgataacctgcacttggaagatttatttataggcaacaaagtgaatgtcttttctcgacaactggtattaattgactatggggatcaatatacagctcgccagctgggcagtaggaaagaaaaaacgctagccctaattaaaccagatgcaatatcaaaggctggagaaataattgaaataataaacaaagctggatttactataaccaaactcaaaatgatgatgctttcaaggaaagaagcattggattttcatgtagatcaccagtcaagaccctttttcaatgagctgatccagtttattacaactggtcctattattgccatggagattttaagagatgatgctatatgtgaatggaaaagactgctgggacctgcaaactctggagtggcacgcacagatgcttctgaaagcattagagccctctttggaacagatggcataagaaatgcagcgcatggccctgattcttttgcttctgcggccagagaaatggagttgttttttccttcaagtggaggttgtgggccggcaaacactgctaaatttactaattgtacctgttgcattgttaaaccccatgctgtcagtgaaggactgttgggaaagatcctgatggctatccgagatgcaggttttgaaatctcagctatgcagatgttcaatatggatcgggttaatgttgaggaattctatgaagtttataaaggagtagtgaccgaatatcatgacatggtgacagaaatgtattctggcccttgtgtagcaatggagattcaacagaataatgctacaaagacatttcgagaattttgtggacctgctgatcctgaaattgcccggcatttacgccctggaactctcagagcaatctttggtaaaactaagatccagaatgctgttcactgtactgatctgccagaggatggcctattagaggttcaatacttcttcaagatcttggataattagtggtgtggaaagtaaagaagtcacaggttgggacatttagacaagagtgaatcacacacgaggaatgtgttcattcttttattgtccgttgttttaacctgactgaatacaagatcaacaagagcactgtactcctggcaattattacatatgttagaacatggattttgcactgtagacaacatttaacaccagtctatggggtactgcattgctttttataaagttcaaaataaagatttattttcaaacaagtgactttggtttatttcatacattacactttttcttgcagaaaaaaataaaattgtacaactgcataaatataaaattcttccaccatgaaaatggttaaaacattcataaagacacagcaccagcatgtgatgcctccagaaaggaaaaaaggaaagtaaaagaaaatgtataaagcaaattaattagccctgtcactagccaaagtgatgggcagatccagatctcagacacagctttagaacataccggaggacaaggcaagagatgtcaagacagcattcaatacaagcataacacaacccatcacctttttgtgtttttctgtagtgtcacttaaaatttaaagggcagttcccccatgacaaacccccaccccagcccccaggaaaaaaataaaaataaagacctaacaccacaggaaaagactatggagtatgttaaaaatgctcatcgatgggccattacctttgaaagagccaaaaaacaaaaaaaaaaaaaaaaaaaaaattaccatgccagttttattcccgttgaatatttacaccttggacagcaaaccttgctcacataaagtagaaaacagatacaataaaacatggcttgaaaaatgaccagagtatgcacctgtagtactgtacactaaataaaatacacaaggcagcaatacttaggggccagaaacactgcttactacaagtcagttacggaatcataatttacagtaaaaatgggcacgtcccaaggctcaatttttctttttcttttgtcatttacagtagaataaatattttgttgctattgctacactttaatttacattctaacctattaaatgcagaaagctagtgtaaagcatatagattaagtgtaggtcccatacgtatgacagtttgttcaagactagtaggtttttgtttttgtatctttttttaacttattaaatggctagtgggaaagatttgtgcttgtgatcagctcttaacttcaatttttacatcaaaacgtccctgaaaacggtctttctcactgtacccaatgttctcaccgtacgccttacactctatgcgaatttcagtgtccatggtaagattggtgaactgtacggccagcaggggctgcaggtatttgggctgcaggagtttgccatagtacggataatactgcagaggaaaaccaggggagttgcccagtccaaaatactccacatttccaactttatccttatcttcatctcgcttgccagtgcactgaacgggaaggacatttgggttatacttcatcactgggtaagtctccaaggactcattcttgggaggcttaggtttgaagcctagaactcggttgagctttataataatgcacggtttgccctctttgtagccataagtttcatcatttaatccagagcaatttcccagccattcaagcttgaatctgcagacctttcgctctcctcgttcatgattaaagtctcctcgttctttcggttcactgggcacatcgccacaatcttcaaaaatcatgtcatccctctgggctgaatctttgtacttttccaggaacctaactatgttcagtacatatgcctcatagctcttgggatcattaggacgaaaggaaatttcagtcttctggatctgaggaatctgtgttaatcctggcggggccactcggtcctgatatgtgggcttaaattcactgatggtgagcagcatcacttggatggttccgatgaagatgccagccaggcagccataaaatattacgtagaatagaaggatcttaaaccaactgccaccggtcctgcccagaaactccttcttctctgagttccagatgaatttcttccagctgccctcctccttggctttcccgcgggccatggcgatggcgggtcagcagctgccgcggtccggagggtgggtggctgcggcgcgcgccctggcgtcctctgcgccgctcggcttctccggcctggctctctgcaggcaggacgcgccgctgccgtcgkctctcggagtgcgagacgcgcggcggag

SEQ ID NO: 53 - DNA, 1005 bp, Homo sapien
ggccgctcgctgacgccatgtttcctctttcggccgcgctggtgaacaggacccgtcgccatgggccgtgtgatccgtggacagaggaagggcgccgggtctgtgttccgcgcgcacgtgaagcaccgtaaaggcgctgcgcgcctgcgcgccgtggatttcgctgagcggcacggctacatcaagggcatcgtcaaggacatcatccacgacccgggccgcggcgcgcccctcgccaaggtggtcttccgggatccgtatcggtttaagaagcggacggagctgttcattgccgccgagggcattcacacgggccagtttgtgtattgcggcaagaaggcccagctcaacattggcaatgtgctccctgtgggcaccatgcctgagggtacaatcgtgtgctgcctggaggagaagcctggagaccgtggcaagctggcccgggcatcagggaactatgccaccgttatctcccacaaccctgagaccaagaagacccgtgtgaagctgccctccggctccaagaaggttatctcctcagccaacagagctgtggttggtgtggtggctggaggtggccgaattgacaaacccatcttgaaggctggccgggcgtaccacaaatataaggcaaagaggaactgctggccacgagtacggggtgtggccatgaatcctgtggagcatccttttggaggtggcaaccaccagcacatcggcaagccctccaccatccgcagagatgcccctgctggccgcaaagtgggtctcattgctgcccgccggactggacgtctccggggaaccaagactgtgcaggagaayatgtgggckcmaagtgggtttgccgaaaaaaacacaacaacgcaaacacaaaggcaaacatatagaaaaaaagggggctaccggggccgacactctagaggtaatataatagcggcagaggacaggggagggtagggcaacactttattctgtatatttggccgctctaaaatcacactc

SEQ ID NO: 54 - DNA, 3273 bp, Homo sapien
  misc_feature (3246)..(3246): n=a, c, g or t
gccatggtaagcgcggacgccatggtaagcgcggacgccatggtatggtaagcgcggacgccatggtaagcgcggacgccatggtaagcgcggacgccatggtaagcgcggacgccatggtaagcgcggacgccatggtaagcgcggacgccatggtaagcgcggacgccatggtaagcgcggacgccatggtaagcgcggacgccatgcacacggaccctgactactcggctgcctatgtcgtcatagaaactgatgcagaagatggaatcaaggggtgtggaattaccttcactctgggaaaaggcactgaagttgttgtctgtgctgtgaatgccctcgcccaccatgtgctcaacaaggacctcaaggacattgttggtgacttcagaggcttctataggcagctcacaagtgatgggcagctcagatggattggtccagaaaagggcgtggtgcacctggcgacagcggccgtcctaaacgcggtgtgggacttgtgggccaagcaggagggaaagcctgtctggaagttacttgtggacatggatcccaggatgctggtatcctgcatagatttcaggtacatcactgatgtcctgactgaggaggatgccctagaaatactgcagaaaggtcaaattggtaaaaaagaaagagagaagcaaatgctggcacaaggataccctgcttacacgacatcgtgcgcctggctggggtactcagatgacacgttgaagcagctctgtgcccaggcgctgaaggatggctggaccaggtttaaagtaaaggtgggtgctgatctccaggatgacatgcgaagatgccaaatcatccgagacatgattggaccggaaaagactttgatgatggatgccaaccagcgctgggatgtgcctgaggcggtggagtggatgtccaagctggccaagttcaagccattgtggattgaggagccaacctcccctgatgacattctggggcacgccaccatttccaaggcactggtcccattaggaattggcattgccacaggagaacagtgccacaatagagtgatatttaagcaactcctacaggcgaaggccctgcagttcctccagattgacagttgcagactgggcagtgtcaatgagaacctctcagtattgctgatggccaaaaagtttgaaattcctgtttgcccccatgctggtggagttggcctctgtgaactggtgcagcacctgattatatttgactacatatcagtttctgcaagccttgaaaatagggtgtgtgagtatgttgaccacctgcatgagcatttcaagtatcccgtgatgatccagcgggcttcctacatgcctcccaaggatcccggctactcaacagaaatgaaggaggaatctgtaaagaaacaccagtatccagatggtgaagtttggaagaaactccttcctgctcaagaaaattaagtgctcagccccaacaacttttttctttctgaagtgaaagggcttaaaatttcttggaaatagttttacaaaaatggatttaaaaaatcctaccgatcaagatgagttcagctagaagtcataccaccctcaggaatcagctaaagcaaaaagaacttttacctcggcatccagcccaacccctaaagactgacaatatccttcgagctcctttgaaagcaccctaaacagccatttccattttaatagttggatgcggattgtacccttcaatctgaaagtcttcagctttgaagtcatcaattttctcaacttttcgaagaatcctgagctttgggaaaggtctgggttctcgctgaagctgaattttcagtggctcgatgtgattcaggtaaatatgtgcatctcccaaagtgtgtataaagtcacctggctataaacccgggggagaaagcagaacagtatgttagtttcaattctttaaaacatcatttaaaaacattagaatatgcagacaccgcaaggctttttttaaaaaaataatttagtgtagcttttccatttttttgtagcaacagcatcttgttatgttgcccaggctggtattgaactccagacctcaagcaattgctcctgtctcagtctcccaaagtgctgggattacaggcatgagccaccatacccaacctcagcatagcttttgagaaaatccatagaagctgtatcacaaacaacctgtatagatctgttagtgcgtataccacagggccagaaaaccttccagaagaggaaggtttcaaagtaaaagctggttcatttcttacttacacatatcaaatttaaaagctaatcagagactaaactctgcaatttgttttcccatattaaagaactgaagagctcagtgtggtaggctggcaagtcacccttcccgagacagcccaccttcaggcccgtgatgtgcgcaatcatgtacgtgagcagggcgtagctggcgatgttgaaaggcacaccgaggcccatgtctcccgatctctggtacagctggcaggacagctcactgttcaccacatagaactggcagagggcatggcatggaggcagcgccatcagaggaagatctcttggattccaagcgcacatgatgattcttctgtcgtcagggttggttttgatggtgtcaatcactctttgcagttggtcaactccctgtcctgaataatctgattccatatctctgtattctgccccaaaatgcctccactggaagccataaactgggcccaagtccccttcttctctggtggagaatcccaggctgtccaaaaagtctcgggatccattggcatcccagattttcactcccttggaagacagctctttagcatttgtggatcccttgataaaccacagcaactcctccaaaacacccttccagaacacacgtttggttgtcagcagagggaattcatctctcaggctgtagcgcgcctgcatgccgaataccgacagggtgccggtgcccgtgcggtcgtccttcctgacgccgcagcggaggatgtgttggatctgccccaggtactgcagctccccgtgcggcggacgcggctcggcgtcccgctcctgtgcggcggggggcaagggccggcgcggcagctccgagccggccacaggcatggcgcggcgggcgggggacggaggcaggcgaagtggcgcggcgggacggaggcaggccaagtggcgcggcgggacggaggcaggccaagtggcgcggtggcaggaccctcgnccgattaaccgagcctcgtactagcca

SEQ ID NO: 55 - DNA, 2967 bp, Homo sapien
gccatggtaagcgcggacgccatggtaagcgcggacgccatggtatggtaagcgcggacgccatggtaagcgcggacgccatggtaagcgcggacgccatggtaagcgcggacgccatggtaagcgcggacgccatggtaagcgcggacgccatggtaagcgcggacgccatggtaagcgcggacgccatggtaagcgcggacgccatgcacacggaccctgactactcggctgcctatgtcgtcatagaaactgatgcagaagatggaatcaaggggtgtggaattaccttcactctgggaaaaggcactgaagttgttgtctgtgctgtgaatgccctcgcccaccatgtgctcaacaaggacctcaaggacattgttggtgacttcagaggcttctataggcagctcacaagtgatgggcagctcagatggattggtccagaaaagggcgtggtgcacctggcgacagcggccgtcctaaacgcggtgtgggacttgtgggccaagcaggagggaaagcctgtctggaagttacttgtggacatggatcccaggatgctggtatcctgcatagatttcaggtacatcactgatgtcctgactgaggaggatgccctagaaatactgcagaaaggtcaaattggtaaaaaagaaagagagaagcaaatgctggcacaaggataccctgcttacacgacatcgtgcgcctggctggggtactcagatgacacgttgaagcagctctgtgcccaggcgctgaaggatggctggaccaggtttaaagtaaaggtgggtgctgatctccaggatgacatgcgaagatgccaaatcatccgagacatgattggaccggaaaagactttgatgatggatgccaaccagcgctgggatgtgcctgaggcggtggagtggatgtccaagctggccaagttcaagccattgtggattgaggagccaacctcccctgatgacattctggggcacgccaccatttccaaggcactggtcccattaggaattggcattgccacaggagaacagtgccacaatagagtgatatttaagcaactcctacaggcgaaggccctgcagttcctccagattgacagttgcagactgggcagtgtcaatgagaacctctcagtattgctgatggccaaaaagtttgaaattcctgtttgcccccatgctggtggagttggcctctgtgaactggtgcagcacctgattatatttgactacatatcagtttctgcaagccttgaaaatagggtgtgtgagtatgttgaccacctgcatgagcatttcaagtatcccgtgatgatccagcgggcttcctacatgcctcccaaggatcccggctactcaacagaaatgaaggaggaatctgtaaagaaacaccagtatccagatggtgaagtttggaagaaactccttcctgctcaagaaaattaagtgctcagccccaacaacttttttctttctgaagtgaaagggcttaaaatttcttggaaatagttttacaaaaatggatttaaaaaatcctaccgatcaagatgagttcagctagaagtcataccaccctcaggaatcagctaaagcaaaaagaacttttacctcggcatccagcccaacccctaaagactgacaatatccttcgagctcctttgaaagcaccctaaacagccatttccattttaatagttggatgcggattgtacccttcaatctgaaagtcttcagctttgaagtcatcaattttctcaacttttcgaagaatcctgagctttgggaaaggtctgggttctcgctgaagctaaaaacaaaataaggccattattttgccataattgtacgacctgttgtaattgctcctcatgtccgtgaaacaagtacacaggatgtgatcaacaaagttctattttacaggagtatgatcctgtcgataccttgccgtaggttatgtaacatgattggagcgcaaccagctgttctcttgcacagatcgagagtgaggggtattttgtgacattacacagcatcaggagcctggtgcctcatcaggtaactgaagagctcagtgtggtaggctggcaagtcacccttcccgagacagcccaccttcaggcccgtgatgtgcgcaatcatgtacgtgagcagggcgtagctggcgatgttgaaaggcacaccgaggcccatgtctcccgatctctggtacagctggcaggacagctcactgttcaccacatagaactggcagagggcatggcatggaggcagcgccatcagaggaagatctcttggattccaagcgcacatgatgattcttctgtcgtcagggttggttttgatggtgtcaatcactctttgcagttggtcaactccctgtcctgaataatctgattccatatctctgtattctgccccaaaatgcctccactggaagccataaactgggcccaagtccccttcttctctggtggagaatcccaggctgtccaaaaagtctcgggatccattggcatcccagattttcactcccttggaagacagctctttagcatttgtggatcccttgataaaccacagcaactcctccaaaacacccttccagaacacacgtttggttgtcagcagagggaattcatctctcaggctgtagcgcgcctgcatgccgaataccgacagggtgccggtgcccgtgcggtcgtccttcctgacgccgcagcggaggatgtgttggatctgccccaggtactgcagctccccgtgcggcggacgcggctcggcgtcccgctcctgtgcggcggggggcaagggccggcgcggcagctccgagccggccacaggcatggcgcggcgggcgggggacggaggcaggcgaagtggcgcggcgggacggaggcaggccaagtggcgcggggcaggaccccttccgcgcgccttttcccgcggccgtcccgcg

SEQ ID NO: 56 - DNA, 2761 bp, Homo sapien
  misc_feature (2734)..(2734): n=a, c, g or t
gccatggtaagcgcggacgccatggtaagcgcggacgccatggtatggtaagcgcggacgccatggtaagcgcggacgccatggtaagcgcggacgccatggtaagcgcggacgccatggtaagcgcggacgccatggtaagcgcggacgccatggtaagcgcggacgccatggtaagcgcggacgccatggtaagcgcggacgccatgcacacggaccctgactactcggctgcctatgtcgtcatagaaactgatgcagaagatggaatcaaggggtgtggaattaccttcactctgggaaaaggcactgaagttgttgtctgtgctgtgaatgccctcgcccaccatgtgctcaacaaggacctcaaggacattgttggtgacttcagaggcttctataggcagctcacaagtgatgggcagctcagatggattggtccagaaaagggcgtggtgcacctggcgacagcggccgtcctaaacgcggtgtgggacttgtgggccaagcaggagggaaagcctgtctggaagttacttgtggacatggatcccaggatgctggtatcctgcatagatttcaggtacatcactgatgtcctgactgaggaggatgccctagaaatactgcagaaaggtcaaattggtaaaaaagaaagagagaagcaaatgctggcacaaggataccctgcttacacgacatcgtgcgcctggctggggtactcagatgacacgttgaagcagctctgtgcccaggcgctgaaggatggctggaccaggtttaaagtaaaggtgggtgctgatctccaggatgacatgcgaagatgccaaatcatccgagacatgattggaccggaaaagactttgatgatggatgccaaccagcgctgggatgtgcctgaggcggtggagtggatgtccaagctggccaagttcaagccattgtggattgaggagccaacctcccctgatgacattctggggcacgccaccatttccaaggcactggtcccattaggaattggcattgccacaggagaacagtgccacaatagagtgatatttaagcaactcctacaggcgaaggccctgcagttcctccagattgacagttgcagactgggcagtgtcaatgagaacctctcagtattgctgatggccaaaaagtttgaaattcctgtttgcccccatgctggtggagttggcctctgtgaactggtgcagcacctgattatatttgactacatatcagtttctgcaagccttgaaaatagggtgtgtgagtatgttgaccacctgcatgagcatttcaagtatcccgtgatgatccagcgggcttcctacatgcctcccaaggatcccggctactcaacagaaatgaaggaggaatctgtaaagaaacaccagtatccagatggtgaagtttggaagaaactccttcctgctcaagaaaattaagtgctcagccccaacaacttttttctttctgaagtgaaagggcttaaaatttcttggaaatagttttacaaaaatggatttaaaaaatcctaccgatcaagatgagttcagctagaagtcataccaccctcaggaatcagctaaagcaaaaagaacttttacctcggcatccagcccaacccctaaagactgacaatatccttcgagctcctttgaaagcaccctaaacagccatttccattttaatagttggatgcggattgtacccttcaatctgaaagtcttcagctttgaagtcatcaattttctcaacttttcgaagaatcctgagctttgggaaaggtctgggttctcgctgaagctgaattttcagtggctcgatgtgattcaggtaaatatgtgcatctcccaaagtgtgtataaagtcacctggcttcaggcccgtgatgtgcgcaatcatgtacgtgagcagggcgtagctggcgatgttgaaaggcacaccgaggcccatgtctcccgatctctggtacagctggcaggacagctcactgttcaccacatagaactggcagagggcatggcatggaggcagcgccatcagaggaagatctcttggattccaagcgcacatgatgattcttctgtcgtcagggttggttttgatggtgtcaatcactctttgcagttggtcaactccctgtcctgaataatctgattccatatctctgtattctgccccaaaatgcctccactggaagccataaactgggcccaagtccccttcttctctggtggagaatcccaggctgtccaaaaagtctcgggatccattggcatcccagattttcactcccttggaagacagctctttagcatttgtggatcccttgataaaccacagcaactcctccaaaacacccttccagaacacacgtttggttgtcagcagagggaattcatctctcaggctgtagcgcgcctgcatgccgaataccgacagggtgccggtgcccgtgcggtcgtccttcctgacgccgcagcggaggatgtgttggatctgccccaggtactgcagctccccgtgcggcggacgcggctcggcgtcccgctcctgtgcggcggggggcaagggccggcgcggcagctccgagccggccacaggcatggcgcggcgggcgggggacggaggcaggcgaagtggcgcggcgggacggaggcaggccaagtggcgcggcgggacggaggcaggccaagtggcgcggtggcaggaccctcgnccgattaaccgagcctcgtactagcca

SEQ ID NO: 57 - DNA, 3485 bp, Homo sapien
  misc_feature (3458)..(3458): n=a, c, g or t
gccatggtaagcgcggacgccatggtaagcgcggacgccatggtatggtaagcgcggacgccatggtaagcgcggacgccatggtaagcgcggacgccatggtaagcgcggacgccatggtaagcgcggacgccatggtaagcgcggacgccatggtaagcgcggacgccatggtaagcgcggacgccatggtaagcgcggacgccatgcacacggaccctgactactcggctgcctatgtcgtcatagaaactgatgcagaagatggaatcaaggggtgtggaattaccttcactctgggaaaaggcactgaagttgttgtctgtgctgtgaatgccctcgcccaccatgtgctcaacaaggacctcaaggacattgttggtgacttcagaggcttctataggcagctcacaagtgatgggcagctcagatggattggtccagaaaagggcgtggtgcacctggcgacagcggccgtcctaaacgcggtgtgggacttgtgggccaagcaggagggaaagcctgtctggaagttacttgtggacatggatcccaggatgctggtatcctgcatagatttcaggtacatcactgatgtcctgactgaggaggatgccctagaaatactgcagaaaggtcaaattggtaaaaaagaaagaggtgggttgtaagaaaattttcttcattgtttttgctaacattgtccacttttgagtgcccctgtccttttggggtacacattgtcttcccaaatgccctgtgctgagcagctaggccctcaaatcaacattcaagtctgcatggtgaagcctgctgggtatgacctctgactgcagagtttgcttcagccactgctgaaaggaagtttggctttaggattacactgtagggagagccctgggggagcagggcagtccgtgagagtatcctgatcacctgggtttgacatcctagtaatttgtggctgggtgtgtgtgtgcagggccggatcaggagaacagctggactctccaggggaaacagcttagctacaggcacttccaattccgaagggccctggaaagtgcaaaatgttgacggcgctgtgttttcacagagaagcaaatgctggcacaaggataccctgcttacacgacatcgtgcgcctggctggggtactcagatgacacgttgaagcagctctgtgcccaggcgctgaaggatggctggaccaggtgagtgtgatgatggacctgactttcccagttggcggcaggagagactcaggcagtttaaagtaaaggtgggtgctgatctccaggatgacatgcgaagatgccaaatcatccgagacatgattggaccggaaaagactttgatgatggatgccaaccagcgctgggatgtgcctgaggcggtggagtggatgtccaagctggccaagttcaagccattgtggattgaggagccaacctcccctgatgacattctggggcacgccaccatttccaaggcactggtcccattaggaattggcattgccacaggagaacagtgccacaatagagtgatatttaagcaactcctacaggcgaaggccctgcagttcctccagattgacagttgcagactgggcagtgtcaatgagaacctctcagtattgctgatggccaaaaagtttgaaattcctgtttgcccccatgctggtggagttggcctctgtgaactggtgcagcacctgattatatttgactacatatcagtttctgcaagccttgaaaatagggtgtgtgagtatgttgaccacctgcatgagcatttcaagtatcccgtgatgatccagcgggcttcctacatgcctcccaaggatcccggctactcaacagaaatgaaggaggaatctgtaaagaaacaccagtatccagatggtgaagtttggaagaaactccttcctgctcaagaaaattaagtgctcagccccaacaacttttttctttctgaagtgaaagggcttaaaatttcttggaaatagttttacaaaaatggatttaaaaaatcctaccgatcaagatgagttcagctagaagtcataccaccctcaggaatcagctaaagcaaaaagaacttttacctcggcatccagcccaacccctaaagactgacaatatccttcgagctcctttgaaagcaccctaaacagccatttccattttaatagttggatgcggattgtacccttcaatctgaaagtcttcagctttgaagtcatcaattttctcaacttttcgaagaatcctgagctttgggaaaggtctgggttctcgctgaagctaaaaacaaaataaggccattattttgccataattgtacgacctgttgtaattgctcctcatgtccgtgaaacaagtacacaggatgtgatcaacaaagttctattttacaggagtatgatcctgtcgataccttgccgtaggttatgtaacatgattggagcgcaaccagctgttctcttgcacagatcgagagtgaggggtattttgtgacattacacagcatcaggagcctggtgcctcatcaggtaactgaagagctcagtgtggtaggctggcaagtcacccttcccgagacagcccaccttcaggcccgtgatgtgcgcaatcatgtacgtgagcagggcgtagctggcgatgttgaaaggcacaccgaggcccatgtctcccgatctctggtacagctggcaggacagctcactgttcaccacatagaactggcagagggcatggcatggaggcagcgccatcagaggaagatctcttggattccaagcgcacatgatgattcttctgtcgtcagggttggttttgatggtgtcaatcactctttgcagttggtcaactccctgtcctgaataatctgattccatatctctgtattctgccccaaaatgcctccactggaagccataaactgggcccaagtccccttcttctctggtggagaatcccaggctgtccaaaaagtctcgggatccattggcatcccagattttcactcccttggaagacagctctttagcatttgtggatcccttgataaaccacagcaactcctccaaaacacccttccagaacacacgtttggttgtcagcagagggaattcatctctcaggctgtagcgcgcctgcatgccgaataccgacagggtgccggtgcccgtgcggtcgtccttcctgacgccgcagcggaggatgtgttggatctgccccaggtactgcagctccccgtgcggcggacgcggctcggcgtcccgctcctgtgcggcggggggcaagggccggcgcggcagctccgagccggccacaggcatggcgcggcgggcgggggacggaggcaggcgaagtggcgcggcgggacggaggcaggccaagtggcgcggcgggacggaggcaggccaagtggcgcggtggcaggaccctcgnccgattaaccgagcctcgtactagcca

SEQ ID NO: 58 - DNA, 4112 bp, Homo sapien
  misc_feature (4085)..(4085): n=a, c, g or t
gccatggtaagcgcggacgccatggtaagcgcggacgccatggtatggtaagcgcggacgccatggtaagcgcggacgccatggtaagcgcggacgccatggtaagcgcggacgccatggtaagcgcggacgccatggtaagcgcggacgccatggtaagcgcggacgccatggtaagcgcggacgccatggtaagcgcggacgccatgcacacggaccctgactactcggctgcctatgtcgtcatagaaactgatgcagaagatggaatcaaggggtgtggaattaccttcactctgggaaaaggcactgaagttgttgtctgtgctgtgaatgccctcgcccaccatgtgctcaacaaggacctcaaggacattgttggtgacttcagaggcttctataggcagctcacaagtgatgggcagctcagatggattggtccagaaaagggcgtggtgcacctggcgacagcggccgtcctaaacgcggtgtgggacttgtgggccaagcaggagggaaagcctgtctggaagttacttgtggacatggatcccaggatgctggtatcctgcatagatttcaggtacatcactgatgtcctgactgaggaggatgccctagaaatactgcagaaaggtcaaattggtaaaaaagaaagagagaagcaaatgctggcacaaggataccctgcttacacgacatcgtgcgcctggctggggtactcagatgacacgttgaagcagctctgtgcccaggcgctgaaggatggctggaccaggtttaaagtaaaggtgggtgctgatctccaggatgacatgcgaagatgccaaatcatccgagacatgattggaccggaaaagactttgatgatggatgccaaccagcgctgggatgtgcctgaggcggtggagtggatgtccaagctggccaagttcaagccattgtggattgaggagccaacctcccctgatgacattctggggcacgccaccatttccaaggcactggtcccattaggaattggcattgccacaggagaacaggtgagtgacgcccccaacaggtggatgacgtccccttggggtcagtacacgctgaccagtgaccgaggacacagttgtgtgttaggctccatcacctgctgtactttgagttgggaaattttcatcatcttagaaactgggtcattttatcagagtctagagtcagatatagaaaaagtttgtggctatttctccaatttatatgactaaggtcaggtatctttttcaaagtgtctaattgaaattgaaaaggcagcaatttaaagttgctattgcaagggcagaaaatggtcttaagaaagccagctttcaaattgaataaacatgactgcgttcactttttgagcttataaatgaagcccgagtgcctgccaaaacctgctgcagtcagcccacgagcagagcagcgtgaggagctgattctcagttttcccggcaaaaggagcaatactgctctgccgtggttccgtgttgtcatctgtgccacctgctcatcactgtcaccgtatttcatcctgatgcttcatctcccacttatcagtcgctgtgacagtcattccctcataaatggcgagccagtgtgattttgacctgactcacactgttgcattagcagatttgtaaagaagtgagcacaaggtccctgcccacgctataaaagctcgcctcatgcccagcgagaacaaagaagaaatacagtctgggcttcctgacggccactgatgaataattattggcatagagtggctgcgttgccaggtttagagatcctgaaggccaaggctgactcttctgttggtgttattttcaattctatttccagtgccacaatagagtgatatttaagcaactcctacaggcgaaggccctgcagttcctccagattgacagttgcagactgggcagtgtcaatgagaacctctcagtattgctgatggccaaaaagtttgaaagtaagcgtgctgcagcggctgcagaccagaccttcatttccccactaatcagacacctcccttgatggtttgcaattcacatgcatgggagtctgtagtttgccatttcgatttttttctaactctcatttagctttaatccgggaatttttgattttcatcttggaatttccttcctaaatattaataaatgatttaatcacctgtgggcaataagaaaaaccagaaagttccctttcaccccttcctctccctgccctactcttggtattaaatagaaacgatttccttttagttcctgtttgcccccatgctggtggagttggcctctgtgaactggtgcagcacctgattatatttgactacatatcagtttctgcaagccttgaaaatagggtgtgtgagtatgttgaccacctgcatgagcatttcaagtatcccgtgatgatccagcgggcttcctacatgcctcccaaggatcccggctactcaacagaaatgaaggaggaatctgtaaagaaacaccagtatccagatggtgaagtttggaagaaactccttcctgctcaagaaaattaagtgctcagccccaacaacttttttctttctgaagtgaaagggcttaaaatttcttggaaatagttttacaaaaatggatttaaaaaatcctaccgatcaagatgagttcagctagaagtcataccaccctcaggaatcagctaaagcaaaaagaacttttacctcggcatccagcccaacccctaaagactgacaatatccttcgagctcctttgaaagcaccctaaacagccatttccattttaatagttggatgcggattgtacccttcaatctgaaagtcttcagctttgaagtcatcaattttctcaacttttcgaagaatcctgagctttgggaaaggtctgggttctcgctgaagctaaaaacaaaataaggccattattttgccataattgtacgacctgttgtaattgctcctcatgtccgtgaaacaagtacacaggatgtgatcaacaaagttctattttacaggagtatgatcctgtcgataccttgccgtaggttatgtaacatgattggagcgcaaccagctgttctcttgcacagatcgagagtgaggggtattttgtgacattacacagcatcaggagcctggtgcctcatcaggtaactgaagagctcagtgtggtaggctggcaagtcacccttcccgagacagcccaccttcaggcccgtgatgtgcgcaatcatgtacgtgagcagggcgtagctggcgatgttgaaaggcacaccgaggcccatgtctcccgatctctggtacagctggcaggacagctcactgttcaccacatagaactggcagagggcatggcatggaggcagcgccatcagaggaagatctcttggattccaagcgcacatgatgattcttctgtcgtcagggttggttttgatggtgtcaatcactctttgcagttggtcaactccctgtcctgaataatctgattccatatctctgtattctgccccaaaatgcctccactggaagccataaactgggcccaagtccccttcttctctggtggagaatcccaggctgtccaaaaagtctcgggatccattggcatcccagattttcactcccttggaagacagctctttagcatttgtggatcccttgataaaccacagcaactcctccaaaacacccttccagaacacacgtttggttgtcagcagagggaattcatctctcaggctgtagcgcgcctgcatgccgaataccgacagggtgccggtgcccgtgcggtcgtccttcctgacgccgcagcggaggatgtgttggatctgccccaggtactgcagctccccgtgcggcggacgcggctcggcgtcccgctcctgtgcggcggggggcaagggccggcgcggcagctccgagccggccacaggcatggcgcggcgggcgggggacggaggcaggcgaagtggcgcggcgggacggaggcaggccaagtggcgcggcgggacggaggcaggccaagtggcgcggtggcaggaccctcgnccgattaaccgagcctcgtactagcca

SEQ ID NO: 59 - DNA, 2636 bp, Homo sapien
gccatggtaagcgcggacgccatggtaagcgcggacgccatggtatggtaagcgcggacgccatggtaagcgcggacgccatggtaagcgcggacgccatggtaagcgcggacgccatggtaagcgcggacgccatggtaagcgcggacgccatggtaagcgcggacgccatggtaagcgcggacgccatggtaagcgcggacgccatgcacacggaccctgactactcggctgcctatgtcgtcatagaaactgatgcagaagatggaatcaaggggtgtggaattaccttcactctgggaaaaggcactgaagttgttgtctgtgctgtgaatgccctcgcccaccatgtgctcaacaaggacctcaaggacattgttggtgacttcagaggcttctataggcagctcacaagtgatgggcagctcagatggattggtccagaaaagggcgtggtgcacctggcgacagcggccgtcctaaacgcggtgtgggacttgtgggccaagcaggagggaaagcctgtctggaagttacttgtggacatggatcccaggatgctggtatcctgcatagatttcaggtacatcactgatgtcctgactgaggaggatgccctagaaatactgcagaaaggtcaaattggtaaaaaagaaagagagaagcaaatgctggcacaaggataccctgcttacacgacatcgtgcgcctggctggggtactcagatgacacgttgaagcagctctgtgcccaggcgctgaaggatggctggaccaggtttaaagtaaaggtgggtgctgatctccaggatgacatgcgaagatgccaaatcatccgagacatgattggaccggaaaagactttgatgatggatgccaaccagcgctgggatgtgcctgaggcggtggagtggatgtccaagctggccaagttcaagccattgtggattgaggagccaacctcccctgatgacattctggggcacgccaccatttccaaggcactggtcccattaggaattggcattgccacaggagaacagtgccacaatagagtgatatttaagcaactcctacaggcgaaggccctgcagttcctccagattgacagttgcagactgggcagtgtcaatgagaacctctcagtattgctgatggccaaaaagtttgaaattcctgtttgcccccatgctggtggagttggcctctgtgaactggtgcagcacctgattatatttgactacatatcagtttctgcaagccttgaaaatagggtgtgtgagtatgttgaccacctgcatgagcatttcaagtatcccgtgatgatccagcgggcttcctacatgcctcccaaggatcccggctactcaacagaaatgaaggaggaatctgtaaagaaacaccagtatccagatggtgaagtttggaagaaactccttcctgctcaagaaaattaagtgctcagccccaacaacttttttctttctgaagtgaaagggcttaaaatttcttggaaatagttttacaaaaatggatttaaaaaatcctaccgatcaagatgagttcagctagaagtcataccaccctcaggaatcagctaaagcaaaaagaacttttacctcggcatccagcccaacccctaaagactgacaatatccttcgagctcctttgaaagcaccctaaacagccatttccattttaatagttggatgcggattgtacccttcaatctgaaagtcttcagctttgaagtcatcaattttctcaacttttcgaagaatcctgagctttgggaaaggtctgggttctcgctgaagctaaaaacaaaataaggccattattttgccataattgtacgacctgttgtaattgctcctcatgtccgtgaaacaagtacacaggatgtgatcaacaaagttctattttacaggagtatgatcctgtcgataccttgccgtaggttatgtaacatgattggagcgcaaccagctgttctcttgcacagatcgagagtgaggggtattttgtgacattacacagcatcaggagcctggtgcctcatcaggtgtaagttcttataaccactcttggcaaatttattaaagacaggaacacagtcaatctgtaactcatagtagctctacgtttacttgaattccacaatccctaacccatctgtccctggcagaaagaaggaaagatgacatgcatggacagtgaacagaaagggatgaaagccaggattcctgggatgaacagacagtggcaattaggatgtgaagacaggtcacaacctattactatgtctaaaaacgaccagagcagagagccagagagaataagcctgaagtcacctccactcaaaagcagccaaactccctcaaaggagtaacttttaaaacctggatctaacctggaaggggctaaaaagtgtctggttctgagtttttttccttaaggctcatgaagcagatgaacttacatttttattgccatttcatatcaattgttggctgctataacttagggatttcaacagacttttgaagtttggacctaaatattgtacttaatgtaaattaacaaaaaatatttatggccagggtggtggcttatgcctgtaattccagaattt

SEQ ID NO: 60 - DNA, 2764 bp, Homo sapien
  misc_feature (2737)..(2737): n=a, c, g or t
gccatggtaagcgcggacgccatggtaagcgcggacgccatggtatggtaagcgcggacgccatggtaagcgcggacgccatggtaagcgcggacgccatggtaagcgcggacgccatggtaagcgcggacgccatggtaagcgcggacgccatggtaagcgcggacgccatggtaagcgcggacgccatggtaagcgcggacgccatgcacacggaccctgactactcggctgcctatgtcgtcatagaaactgatgcagaagatggaatcaaggggtgtggaattaccttcactctgggaaaaggcactgaagttgttgtctgtgctgtgaatgccctcgcccaccatgtgctcaacaaggacctcaaggacattgttggtgacttcagaggcttctataggcagctcacaagtgatgggcagctcagatggattggtccagaaaagggcgtggtgcacctggcgacagcggccgtcctaaacgcggtgtgggacttgtgggccaagcaggagggaaagcctgtctggaagttacttgtggacatggatcccaggatgctggtatcctgcatagatttcaggtacatcactgatgtcctgactgaggaggatgccctagaaatactgcagaaaggtcaaattggtaaaaaagaaagagagaagcaaatgctggcacaaggataccctgcttacacgacatcgtgcgcctggctggggtactcagatgacacgttgaagcagctctgtgcccaggcgctgaaggatggctggaccaggtttaaagtaaaggtgggtgctgatctccaggatgacatgcgaagatgccaaatcatccgagacatgattggaccggaaaagactttgatgatggatgccaaccagcgctgggatgtgcctgaggcggtggagtggatgtccaagctggccaagttcaagccattgtggattgaggagccaacctcccctgatgacattctggggcacgccaccatttccaaggcactggtcccattaggaattggcattgccacaggagaacagggtgtgtgagtatgttgaccacctgcatgagcatttcaagtatcccgtgatgatccagcgggcttcctacatgcctcccaaggatcccggctactcaacagaaatgaaggaggaatctgtaaagaaacaccagtatccagatggtgaagtttggaagaaactccttcctgctcaagaaaattaagtgctcagccccaacaacttttttctttctgaagtgaaagggcttaaaatttcttggaaatagttttacaaaaatggatttaaaaaatcctaccgatcaagatgagttcagctagaagtcataccaccctcaggaatcagctaaagcaaaaagaacttttacctcggcatccagcccaacccctaaagactgacaatatccttcgagctcctttgaaagcaccctaaacagccatttccattttaatagttggatgcggattgtacccttcaatctgaaagtcttcagctttgaagtcatcaattttctcaacttttcgaagaatcctgagctttgggaaaggtctgggttctcgctgaagctaaaaacaaaataaggccattattttgccataattgtacgacctgttgtaattgctcctcatgtccgtgaaacaagtacacaggatgtgatcaacaaagttctattttacaggagtatgatcctgtcgataccttgccgtaggttatgtaacatgattggagcgcaaccagctgttctcttgcacagatcgagagtgaggggtattttgtgacattacacagcatcaggagcctggtgcctcatcaggtaactgaagagctcagtgtggtaggctggcaagtcacccttcccgagacagcccaccttcaggcccgtgatgtgcgcaatcatgtacgtgagcagggcgtagctggcgatgttgaaaggcacaccgaggcccatgtctcccgatctctggtacagctggcaggacagctcactgttcaccacatagaactggcagagggcatggcatggaggcagcgccatcagaggaagatctcttggattccaagcgcacatgatgattcttctgtcgtcagggttggttttgatggtgtcaatcactctttgcagttggtcaactccctgtcctgaataatctgattccatatctctgtattctgccccaaaatgcctccactggaagccataaactgggcccaagtccccttcttctctggtggagaatcccaggctgtccaaaaagtctcgggatccattggcatcccagattttcactcccttggaagacagctctttagcatttgtggatcccttgataaaccacagcaactcctccaaaacacccttccagaacacacgtttggttgtcagcagagggaattcatctctcaggctgtagcgcgcctgcatgccgaataccgacagggtgccggtgcccgtgcggtcgtccttcctgacgccgcagcggaggatgtgttggatctgccccaggtactgcagctccccgtgcggcggacgcggctcggcgtcccgctcctgtgcggcggggggcaagggccggcgcggcagctccgagccggccacaggcatggcgcggcgggcgggggacggaggcaggcgaagtggcgcggcgggacggaggcaggccaagtggcgcggcgggacggaggcaggccaagtggcgcggtggcaggaccctcgnccgattaaccgagcctcgtactagcca

SEQ ID NO: 61 - DNA, 3436 bp, Homo sapien
gccatggtaagcgcggacgccatggtaagcgcggacgccatggtatggtaagcgcggacgccatggtaagcgcggacgccatggtaagcgcggacgccatggtaagcgcggacgccatggtaagcgcggacgccatggtaagcgcggacgccatggtaagcgcggacgccatggtaagcgcggacgccatggtaagcgcggacgccatgcacacggaccctgactactcggctgcctatgtcgtcatagaaactgatgcagaagatggaatcaaggggtgtggaattaccttcactctgggaaaaggcactgaagttgttgtctgtgctgtgaatgccctcgcccaccatgtgctcaacaaggacctcaaggacattgttggtgacttcagaggcttctataggcagctcacaagtgatgggcagctcagatggattggtccagaaaagggcgtggtgcacctggcgacagcggccgtcctaaacgcggtgtgggacttgtgggccaagcaggagggaaagcctgtctggaagttacttgtggacatggatcccaggatgctggtatcctgcatagatttcaggtacatcactgatgtcctgactgaggaggatgccctagaaatactgcagaaaggtcaaattggtaaaaaagaaagagagaagcaaatgctggcacaaggataccctgcttacacgacatcgtgcgcctggctggggtactcagatgacacgttgaagcagctctgtgcccaggcgctgaaggatggctggaccaggtttaaagtaaaggtgggtgctgatctccaggatgacatgcgaagatgccaaatcatccgagacatgattggaccggaaaagactttgatgatggatgccaaccagcgctgggatgtgcctgaggcggtggagtggatgtccaagctggccaagttcaagccattgtggattgaggagccaacctcccctgatgacattctggggcacgccaccatttccaaggcactggtcccattaggaattggcattgccacaggagaacagtgccacaatagagtgatatttaagcaactcctacaggcgaaggccctgcagttcctccagattgacagttgcagactgggcagtgtcaatgagaacctctcagtattgctgatggccaaaaagtttgaaattcctgtttgcccccatgctggtggagttggcctctgtgaactggtgcagcacctgattatatttgactacatatcagtttctgcaagccttgaaaatagggtgtgtgagtatgttgaccacctgcatgagcatttcaagtatcccgtgatgatccagcgggcttcctacatgcctcccaaggatcccggctactcaacagaaatgaaggaggaatctgtaaagaaacaccagtatccagatggtgaagtttggaagaaactccttcctgctcaagaaaattaagtgctcagccccaacaacttttttctttctgaagtgaaagggcttaaaatttcttggaaatagttttacaaaaatggatttaaaaaatcctaccgatcaagatgagttcagctagaagtcataccaccctcaggaatcagctaaagcaaaaagaacttttacctcggcatccagcccaacccctaaagactgacaatatccttcgagctcctttgaaagcaccctaaacagccatttccattttaatagttggatgcggattgtacccttcaatctgaaagtcttcagctttgaagtcatcaattttctcaacttttcgaagaatcctgagctttgggaaaggtctgggttctcgctgaagctaaaaacaaaataaggccattattttgccataattgtacgacctgttgtaattgctcctcatgtccgtgaaacaagtacacaggatgtgatcaacaaagttctattttacaggagtatgatcctgtcgataccttgccgtaggttatgtaacatgattggagcgcaaccagctgttctcttgcacagatcgagagtgaggggtattttgtgacattacacagcatcaggagcctggtgcctcatcaggtaactgaagagctcagtgtggtaggctggcaagtcacccttcccgagacagcccaccttcaggcccgtgatgtgcgcaatcatgtacgtgagcagggcgtagctggcgatgttgaaaggcacaccgaggcccatgtctcccgatctctggtacagctggcaggacagctcactgttcaccacatagaactggcagagggcatggcatggaggcagcgccatcagaggaagataggaaccagcagaggaagataaggagggatggtggtttgaaagaccacagctaaaggcaaagtaaaacaggagagaaacagaagccaactcatatggtggagaccaggagagagagccactgggctgcagtgatgtccataacagcctctgcagcgatggcacggagctgagggagactatccatcggtgcaaggtttctgcaggtgtccatttacggctgaagcaatgctcttccatcagagctgaagggatctgggctacctcgtggcaccagattacaaatacagcaggaataattctgtttgccacaggaaactggtgcttctggtacaccctcctatattaaaagtctctattacatggccaggcacagtggctcatgcctgaaatcccaacactgggacgccagggtgggcagatcacttgaggccaacttgagttcgagactagcctggccaacatagtgaaaccccgtctctgctaaaaatacaaaaattcgcgcgcctgtggtcccagctctggggctgaggaatgggaactcacttgaacctgggagatggaggttgccgtgagctggagtgcaatggcgtgatcatgactcactacagcctcaaattcctgggttcaaatgatcctctcgccttggcctctggagttgttggaattacaggtgtgagccaccacacctggctctacaccctggtagagttgaattttacaatataattgttaaaaatgttagtgaggtggcagcgagctggaacttcatctgcttccatttaaaatgttaacatcttacatgtagtttctaggcaatttaaaaccctttttggtgtaagaatgagtataaatacacaaattaagatcatctggttgggaggctgaggcaggcagatcatctgaggtcaggagttcaagaccagcctgaccaacatggtgaaaccccgtctctactaaaaatacaaaattagccgggcatggtggcacatgcctgtaatcccagctacttgggaggctgaggcaggagaatcactcgaacccaggaggcagaggttacagtgagccaagatcacgccgttgcattccagcctgggcaacagagcaaaactctgtctcaaaaaaaaaaaaaaaaaaaa

SEQ ID NO: 62 - DNA, 2928 bp, Homo sapien
gccatggtaagcgcggacgccatggtaagcgcggacgccatggtatggtaagcgcggacgccatggtaagcgcggacgccatggtaagcgcggacgccatggtaagcgcggacgccatggtaagcgcggacgccatggtaagcgcggacgccatggtaagcgcggacgccatggtaagcgcggacgccatggtaagcgcggacgccatgcacacggaccctgactactcggctgcctatgtcgtcatagaaactgatgcagaagatggaatcaaggggtgtggaattaccttcactctgggaaaaggcactgaagttgttgtctgtgctgtgaatgccctcgcccaccatgtgctcaacaaggacctcaaggacattgttggtgacttcagaggcttctataggcagctcacaagtgatgggcagctcagatggattggtccagaaaagggcgtggtgcacctggcgacagcggccgtcctaaacgcggtgtgggacttgtgggccaagcaggagggaaagcctgtctggaagttacttgtggacatggatcccaggatgctggtatcctgcatagatttcaggtacatcactgatgtcctgactgaggaggatgccctagaaatactgcagaaaggtcaaattggtaaaaaagaaagagagaagcaaatgctggcacaaggataccctgcttacacgacatcgtgcgcctggctggggtactcagatgacacgttgaagcagctctgtgcccaggcgctgaaggatggctggaccaggtttaaagtaaaggtgggtgctgatctccaggatgacatgcgaagatgccaaatcatccgagacatgattggaccggaaaagactttgatgatggatgccaaccagcgctgggatgtgcctgaggcggtggagtggatgtccaagctggccaagttcaagccattgtggattgaggagccaacctcccctgatgacattctggggcacgccaccatttccaaggcactggtcccattaggaattggcattgccacaggagaacagtgccacaatagagtgatatttaagcaactcctacaggcgaaggccctgcagttcctccagattgacagttgcagactgggcagtgtcaatgagaacctctcagtattgctgatggccaaaaagtttgaaattcctgtttgcccccatgctggtggagttggcctctgtgaactggtgcagcacctgattatatttgactacatatcagtttctgcaagccttgaaaatagggtgtgtgagtatgttgaccacctgcatgagcatttcaagtatcccgtgatgatccagcgggcttcctacatgcctcccaaggatcccggctactcaacagaaatgaaggaggaatctgtaaagaaacaccagtatccagatggtgaagtttggaagaaactccttcctgctcaagaaaattaagtgctcagccccaacaacttttttctttctgaagtgaaagggcttaaaatttcttggaaatagttttacaaaaatggatttaaaaaatcctaccgatcaagatgagttcagctagaagtcataccaccctcaggaatcagctaaagcaaaaagaacttttacctcggcatccagcccaacccctaaagactgacaatatccttcgagctcctttgaaagcaccctaaacagccatttccattttaatagttggatgcggattgtacccttcaatctgaaagtcttcagctttgaagtcatcaattttctcaacttttcgaagaatcctgagctttgggaaaggtctgggttctcgctgaagctaaaaacaaaataaggccattattttgccataattgtacgacctgttgtaattgctcctcatgtccgtgaaacaagtacacaggatgtgatcaacaaagttctattttacaggagtatgatcctgtcgataccttgccgtaggttatgtaacatgattggagcgcaaccagctgttctcttgcacagatcgagagtgaggggtattttgtgacattacacagcatcaggagcctggtgcctcatcaggtaactgaagagctcagtgtggtaggctggcaagtcacccttcccgagacagcccaccttcaggcccgtgatgtgcgcaatcatgtacgtgagcagggcgtagctggcgatgttgaaaggcacaccgaggcccatgtctcccgatctctggtacagctggcaggacagctcactgttcaccacatagaactggcagagggcatggcatggaggcagcgccatcagaggaagataggaaccagcagaggaagataaggagggatggtggtttgaaagaccacagctaaaggcaaagtaaaacaggagagaaacagaagccaactcatatggtggagaccaggagagagagccactgggctgcagtgatgtccataacagcctctgcagcgatggcacggagctgagggagactatccatcggtgcaaggtttctgcaggtgtccatttacggctgaagcaatgctcttccatcagagctgaagggatctgggctacctcgtggcaccagattacaaatacagcaggaataattctgtttgccacaggaaactggtgcttctggtacaccctcctatattaaaagtctctattacatggccaggcacagtggctcatgcctgaaatcccaacactgggacgccagggtgggcagatcacttgaggccaacttgagttcgagactagcctggccaacatagtgaaaccccgtctctgctaaaaatacaaaaattcgcgcgcctgtggtcccagctctggggctgaggaatgggaactcacttgaacctgggagatggaggttgccgtgagcggagatcacaccactgcactccagcctgggcaacagggtgagactgtgtctcaa

SEQ ID NO: 63 - DNA, 3100 bp, Homo sapien
gccatggtaagcgcggacgccatggtaagcgcggacgccatggtatggtaagcgcggacgccatggtaagcgcggacgccatggtaagcgcggacgccatggtaagcgcggacgccatggtaagcgcggacgccatggtaagcgcggacgccatggtaagcgcggacgccatggtaagcgcggacgccatggtaagcgcggacgccatgcacacggaccctgactactcggctgcctatgtcgtcatagaaactgatgcagaagatggaatcaaggggtgtggaattaccttcactctgggaaaaggcactgaagttgttgtctgtgctgtgaatgccctcgcccaccatgtgctcaacaaggacctcaaggacattgttggtgacttcagaggcttctataggcagctcacaagtgatgggcagctcagatggattggtccagaaaagggcgtggtgcacctggcgacagcggccgtcctaaacgcggtgtgggacttgtgggccaagcaggagggaaagcctgtctggaagttacttgtggacatggatcccaggatgctggtatcctgcatagatttcaggtacatcactgatgtcctgactgaggaggatgccctagaaatactgcagaaaggtcaaattggtaaaaaagaaagagagaagcaaatgctggcacaaggataccctgcttacacgacatcgtgcgcctggctggggtactcagatgacacgttgaagcagctctgtgcccaggcgctgaaggatggctggaccaggtttaaagtaaaggtgggtgctgatctccaggatgacatgcgaagatgccaaatcatccgagacatgattggaccggaaaagactttgatgatggatgccaaccagcgctgggatgtgcctgaggcggtggagtggatgtccaagctggccaagttcaagccattgtggattgaggagccaacctcccctgatgacattctggggcacgccaccatttccaaggcactggtcccattaggaattggcattgccacaggagaacagtgccacaatagagtgatatttaagcaactcctacaggcgaaggccctgcagttcctccagattgacagttgcagactgggcagtgtcaatgagaacctctcagtattgctgatggccaaaaagtttgaaattcctgtttgcccccatgctggtggagttggcctctgtgaactggtgcagcacctgattatatttgactacatatcagtttctgcaagccttgaaaatagggtgtgtgagtatgttgaccacctgcatgagcatttcaagtatcccgtgatgatccagcgggcttcctacatgcctcccaaggatcccggctactcaacagaaatgaaggaggaatctgtaaagaaacaccagtatccagatggtgaagtttggaagaaactccttcctgctcaagaaaattaagtgctcagccccaacaacttttttctttctgaagtgaaagggcttaaaatttcttggaaatagttttacaaaaatggatttaaaaaatcctaccgatcaagatgagttcagctagaagtcataccaccctcaggaatcagctaaagcaaaaagaacttttacctcggcatccagcccaacccctaaagactgacaatatccttcgagctcctttgaaagcaccctaaacagccatttccattttaatagttggatgcggattgtacccttcaatctgaaagtcttcagctttgaagtcatcaattttctcaacttttcgaagaatcctgagctttgggaaaggtctgggttctcgctgaagctaaaaacaaaataaggccattattttgccataattgtacgacctgttgtaattgctcctcatgtccgtgaaacaagtacacaggatgtgatcaacaaagttctattttacaggagtatgatcctgtcgataccttgccgtaggttatgtaacatgattggagcgcaaccagctgttctcttgcacagatcgagagtgaggggtattttgtgacattacacagcatcaggagcctggtgcctcatcaggtaactgaagagctcagtgtggtaggctggcaagtcacccttcccgagacagcccaccttcaggcccgtgatgtgcgcaatcatgtacgtgagcagggcgtagctggcgatgttgaaaggcacaccgaggcccatgtctcccgatctctggtacagctggcaggacagctcactgttcaccacatagaactggcagagggcatggcatggaggcagcgccatcagaggaagatctcttggattccaagcgcacatgatgattcttctgtcgtcagggttggttttgatggtgtcaatcactctttgcagttggtcaactccctgtcctgaataatctgattccatatctctgtattctgccccaaaatgcctccactggaagccataaactgggcccaagtccccttcttctctggtggagaatcccaggctgtccaaaaagtctcgggatccattggcatcccagattttcactcccttggaagacagctctttagcatttgtggatcccttgataaaccacagcaactcctccaaaacacccttccagaacacacgtttggttgtcagcagagggaattcatctctcaggctgtagcgcgcctgcatgccgaataccgacagggtgccggtgcccgtgcggtcgtccttcctgacgccgcagcggaggatgtgttggatctgccccaggatttccaggtcccagatgaagagataattctacttactggatataggatgcattagatcttcttaccttaaaaaaaaaaaaaaggcagcaatgatcaaaatactaataaattactcacagactcagtgtattttttcttggagtaaaagtccaggatgggtaatagaatacctgctgttggcttttggaaaaattggtactgtatgtagcaaaataatgtgaaacccatatgcatggatattcttaacaatttgaagaaatcgtcacagctttcctgggttgttgagcctctaagatggtcttttcctctgatgtgataataaagtgtttattctgaactcta

SEQ ID NO: 64 - DNA, 463 bp, Homo sapien
tggatcgtggtcgcggcgaggtacaggattagactgggtttatatttaactcttgcctcataggtgtactacacgcgcctgggcaacgacttccacacgaacaagcgcgtgtgcgaggagatcgccattatccccagcaaaaagctccgcaacaagatagcaggttatgtcacgcatctgatgaagcgaattcagagaggcccagtaagaggtatctccatcaagctgcaggaggaggagagagaaaggagagacaattatgttcctgaggtctcagccttggatcaggagattattgaagtagatcctgacactaaggaaatgctgaagcttttggacttcggcagtctgtccaaccttcaggtcactcagcctacagttgggatgaatttcaaaacgcctcggggacctgtttgaattttttctgtagtgctgtattattttcaataaatctgggacaaca

SEQ ID NO: 65 - DNA, 5226 bp, Homo sapien
gcggtggcggtggcggccgcgtcccggcggcagtcgtgctacctgtgtgacctgccccgcatgccctgggccatgatctgggacttcaccgaacccgtctgccgcggctgcgtcaactacgagggcgccgaccgcgtcgagttcgtcatcgagacggcgcggcagctcaagcgggcgcacggctgcttcccggagggtcgctccccacccggcgccgcggcctcggccgccgccaagccgccgccgctctccgccaaggacatccttttgcagcagcagcagcagcttggccacggcggccccgaggcggccccgcgcgcgccgcaggccttggagcgctacccgttggcggccgcggccgagaggcccccgcgcctcggctctgacttcggcagcagccgcccggcagcgagcctggcccagccgccgacgccgcagccgccgcccgtgaacggcatcctggtgcccaacggcttctccaagctagaggagccgcccgagctgaatcgccagagcccgaacccgcggcgcggccacgcggtgccgcccaccctggtgccgctcatgaacggctcggccacgccgctgcccaccgcgctcggcctcggcggccgcgctgccgcctccttagccgcggtgtccggaaccgcggccgccagcctgggctccgcgcagcccaccgatctgggcgcccacaagcggccggcatccgtgtcgagcagcgctgccgtggagcacgagcagcgtgaggcggcagccaaggagaaacaaccgccgccgcctgcgcaccggggcccggccgacagcctgtccaccgcggccggggccgccgagctgagcgcggaaggtgcgggcaagagccgcgggtctggagagcaggactgggtcaacaggcccaagaccgtgcgcgacacgctgctggcgctgcaccagcacggccactcggggcccttcgagagcaagtttaagaaggagccggccctgactgcaggcaggttgttgggtttcgaggccaacggggccaacgggtctaaagcaggtaggggcggctgtgaagtgagggggtctaggggagaaaaggggacggagagcagaggaagggtggttctttggattcaccattttaccccagcccagaaacaacaaacaccccacttcctgatctgcctgaggcggaaccagtgcttggtggcaacgtgttcatgtgctgaagcagcataacagagatgagtcagactgggctgatacgctctgacacggggttttcctttcccagcacattcttggatgggagcatgagggcaccagtcaccttttaacctattgggggacattagcagtcacatgttgagtgcaaacgagggtacttttgtgcatgtgtacaaacaggcagttacaagcgtgtcattttcagtggctccattttaaatcagtctgctgcctcagaatcccgtacgcctgaaggttttaagttgcatgtgcacctgaaactcgtatatgagtattttctgtctgtgcttttagagaggaggaattctgtaacgacttttgtttcgggttaggaagagaatgatctctttcagtgcaccgccacttatgttacctttttccttttatttctttgtgtttccagttgcaagaacagcaaggaaaaggaagccctctccagaaccagaaggtgaagtcgggccccctaagatcaacggagaggcccagccgtggctgtccacatccacagaggggctcaagatccccatgactcctacatcctcttttgtgtctccgccaccacccactgcctcacctcattccaaccggaccacaccgcctgaagcggcccagaatggccagtcccccatggcagccctgatcttagtagcagacaatgcagggggcagtcatgcctcaaaagatgccaaccaggttcactccactaccaggaggaatagcaacagtccgccctctccgtcctctatgaaccaaagaaggctgggccccagagaggtggggggccagggagcaggcaacacaggaggactggagccagtgcaccctgccagcctcccggactcctctctggcaaccagtgccccgctgtgctgcaccctctgccacgagcggctggaggacacccattttgtgcagtgcccgtccgtcccttcgcacaagttctgcttcccttgctccagacaaagcatcaaacagcagggagctagtggagaggtctattgtcccagtggggaaaaatgccctcttgtgggctccaatgtcccctgggcctttatgcaaggggaaattgcaaccatccttgctggagatgtgaaagtgaaaaaagagagagactcgtgacttttccggtttcagaaaaacccaatgattacccttaattaaaactgcttgaattgtatatatatctccatatatatatatatccaagacaagggaaatgtagacttcataaacatggctgtataattttgattttttttgaatacattgtgtttctatattttttttgacgacaaaaggtatgtacttataaagacatttttttcttttgttaacgttattagcatatctttgtgctttattatcctggtgacagttaccgttctatgtaggctgtgacttgcgctgcttttttagagcacttggcaaatcagaaatgcttctagctgtatttgtatgcacttattttaaaaagaaaaaaaaagccaaatacattttctgacattgtaagattgccttactgtctgtcattccttattgctggcccctttctcaggccggaggccaagtggtggagaaggaaaggaaatgatcgaacgggcatgttgtcaagtgggcatgccactgggaaataccaccagtttaccctgaaacattgtcctcagaggagtaggaaagtggattttgaatctctattttgctcaaaagttcagttcctgagatactgatgactgagagtgctgctgggaaattttcaggattgtgtggtcttttggggttttttgtttttttttttttaagacaaagttgaccgctgttcactgtccacgtgatcagttgtaagattacaatgctgcatgctagttggttacataagatacaattccagtgatggaaggcggttataatggatggtggtgtgtacaagatggcactgccatctttgagcagagcccagctctgcagcgccacttcatctttttaaacaccctagaggtctgtttgttgttgctgttgtcctttattttgaaagagttgcaagagaagttacagtccaggtgaacttggagattgtgggattggttttgtttctgttttgttttgtttatcatttacctgtagtgctattgctgttgatactatcacctataccctgtttctagtgagtgctgaatacagtatggtacaatgacagtaacagccgcgtggtgctgccaggactgcccttgggcatatcagtgacagcccaaatgtgggtggaggaaacctgtaatttccttcttaacatgtgtttgaaataccaagtgaataatactgttctggaaaaaaatgataaactagtggaaattaaagaaattaagggttttatataatagacaggccccacctctcaaaatatttttagaagtctttttgtaaactaatttcttttgatcactattttgcatcagtaaaatgatttttttaaaaccaataaatcatcaattattagaaatagttgtctcacagtgatactggtttttcttttgtgctgttatgatttaacattgacaggaacactattttaaatccttacgttcaggtgtttgtaacttggccttataattaggctgaattatggcttcaaggtctacaatttatgtgtatggttcacagcctagcttctatttacatttgaaaatacagatttttaccaactttggattcttttttagttatatgtttgtctttcctttttaaattgttcaaaactattttttaatggtcaagttactaacacttgaaaatcagatactgcaccaaatacagtgtttttccgtagtgtttttaatgagtgcacctattactactgtgcgagaattcatgttttaccagtcattgttatattacaaacagacttgcatgattaaccagttgttacacttactttttcaagttggagtatatatgactcagtgcagactggtctctcttatgtgaatgcacacatgcagaaatgcagagtcaattttacatgcccataaagacatttgtaaagaattcagctcttatggtctgttgtataaatgtgtatctaggcactttattataactggaatttgacctcacagatgttacaacttgatcagtcgtttgacctaatttgtggtagctatctgtatgttttgcaatcttaatacagacatgctttccaaaaagattaatacagaaccatcctgccgttttggataagtctatccagctgtggaaagggcaacctgtggtttctctgtactggtgtttaatgggggaagaatatgaacagctttaaagagctgtgtattgtggttactactattaaaaaataagatctgcacgagtctgactggcctttgggtggcctttgtggacggctcgtagctggaaagtgttgatctgggttttctggcattcttttaagttaaaaagttaacatcgggacatgggtttgatcttttgttgtacctgatgacagtgcagagattctccacagctggataaaaatgtcacaaagctacttactgtacatgggcagtatcagatttcaaatcctaatatttcagctgtgcttttaatactcaaaatattaggggatggggtgttgaagctttcccttttttgcttttaacaatttatagaatttaacagatgtactgtctttcatgtggcctcacatttaaagttatgagaacatacacatggtttacaacttttactatatacctttccttggccaccaagtattttaaaagtgtgccaccttttaacctttactttttttaagttgaaggtgatactttttctatatatgatgaaactcatgtcaactgaagtgagtgtaatctcagatatcaacattattatattttaaaatcacgctatggaaatatcacctgaattctgtcatttgtcagatttacagtacctttttttctttaacttttagcattaaataaaaataaaattgggagcactgaa

SEQ ID NO: 66 - DNA, 5045 bp, Homo sapien
gcggtggcggtggcggccgcgtcccggcggcagtcgtgctacctgtgtgacctgccccgcatgccctgggccatgatctgggacttcaccgaacccgtctgccgcggctgcgtcaactacgagggcgccgaccgcgtcgagttcgtcatcgagacggcgcggcagctcaagcgggcgcacggctgcttcccggagggtcgctccccacccggcgccgcggcctcggccgccgccaagccgccgccgctctccgccaaggacatccttttgcagcagcagcagcagcttggccacggcggccccgaggcggccccgcgcgcgccgcaggccttggagcgctacccgttggcggccgcggccgagaggcccccgcgcctcggctctgacttcggcagcagccgcccggcagcgagcctggcccagccgccgacgccgcagccgccgcccgtgaacggcatcctggtgcccaacggcttctccaagctagaggagccgcccgagctgaatcgccagagcccgaacccgcggcgcggccacgcggtgccgcccaccctggtgccgctcatgaacggctcggccacgccgctgcccaccgcgctcggcctcggcggccgcgctgccgcctccttagccgcggtgtccggaaccgcggccgccagcctgggctccgcgcagcccaccgatctgggcgcccacaagcggccggcatccgtgtcgagcagcgctgccgtggagcacgagcagcgtgaggcggcagccaaggagaaacaaccgccgccgcctgcgcaccggggcccggccgacagcctgtccaccgcggccggggccgccgagctgagcgcggaaggtgcgggcaagagccgcgggtctggagagcaggactgggtcaacaggcccaagaccgtgcgcgacacgctgctggcgctgcaccagcacggccactcggggcccttcgagagcaagtttaagaaggagccggccctgactgcaggcaggttgttgggtttcgaggccaacggggccaacgggtctaaagcaggtaggggcggctgtgaagtgagggggtctaggggagaaaaggggacggagagcagaggaagggtggttctttggattcaccattttaccccagcccagaaacaacaaacaccccacttcctgatctgcctgaggcggaaccagtgcttggtggcaacgtgttcatgtgctgaagcagcataacagagatgagtcagactgggctgatacgctctgacacggggttttcctttcccagcacattcttggatgggagcatgagggcaccagtcaccttttaacctattgggggacattagcagtcacatgttgagtgcaaacgagggtacttttgtgcatgtgtacaaacaggcagttacaagcgtgtcattttcagtggctccattttaaatcagtctgctgcctcagaatcccttgcaagaacagcaaggaaaaggaagccctctccagaaccagaaggtgaagtcgggccccctaagatcaacggagaggcccagccgtggctgtccacatccacagaggggctcaagatccccatgactcctacatcctcttttgtgtctccgccaccacccactgcctcacctcattccaaccggaccacaccgcctgaagcggcccagaatggccagtcccccatggcagccctgatcttagtagcagacaatgcagggggcagtcatgcctcaaaagatgccaaccaggttcactccactaccaggaggaatagcaacagtccgccctctccgtcctctatgaaccaaagaaggctgggccccagagaggtggggggccagggagcaggcaacacaggaggactggagccagtgcaccctgccagcctcccggactcctctctggcaaccagtgccccgctgtgctgcaccctctgccacgagcggctggaggacacccattttgtgcagtgcccgtccgtcccttcgcacaagttctgcttcccttgctccagacaaagcatcaaacagcagggagctagtggagaggtctattgtcccagtggggaaaaatgccctcttgtgggctccaatgtcccctgggcctttatgcaaggggaaattgcaaccatccttgctggagatgtgaaagtgaaaaaagagagagactcgtgacttttccggtttcagaaaaacccaatgattacccttaattaaaactgcttgaattgtatatatatctccatatatatatatatccaagacaagggaaatgtagacttcataaacatggctgtataattttgattttttttgaatacattgtgtttctatattttttttgacgacaaaaggtatgtacttataaagacatttttttcttttgttaacgttattagcatatctttgtgctttattatcctggtgacagttaccgttctatgtaggctgtgacttgcgctgcttttttagagcacttggcaaatcagaaatgcttctagctgtatttgtatgcacttattttaaaaagaaaaaaaaagccaaatacattttctgacattgtaagattgccttactgtctgtcattccttattgctggcccctttctcaggccggaggccaagtggtggagaaggaaaggaaatgatcgaacgggcatgttgtcaagtgggcatgccactgggaaataccaccagtttaccctgaaacattgtcctcagaggagtaggaaagtggattttgaatctctattttgctcaaaagttcagttcctgagatactgatgactgagagtgctgctgggaaattttcaggattgtgtggtcttttggggttttttgtttttttttttttaagacaaagttgaccgctgttcactgtccacgtgatcagttgtaagattacaatgctgcatgctagttggttacataagatacaattccagtgatggaaggcggttataatggatggtggtgtgtacaagatggcactgccatctttgagcagagcccagctctgcagcgccacttcatctttttaaacaccctagaggtctgtttgttgttgctgttgtcctttattttgaaagagttgcaagagaagttacagtccaggtgaacttggagattgtgggattggttttgtttctgttttgttttgtttatcatttacctgtagtgctattgctgttgatactatcacctataccctgtttctagtgagtgctgaatacagtatggtacaatgacagtaacagccgcgtggtgctgccaggactgcccttgggcatatcagtgacagcccaaatgtgggtggaggaaacctgtaatttccttcttaacatgtgtttgaaataccaagtgaataatactgttctggaaaaaaatgataaactagtggaaattaaagaaattaagggttttatataatagacaggccccacctctcaaaatatttttagaagtctttttgtaaactaatttcttttgatcactattttgcatcagtaaaatgatttttttaaaaccaataaatcatcaattattagaaatagttgtctcacagtgatactggtttttcttttgtgctgttatgatttaacattgacaggaacactattttaaatccttacgttcaggtgtttgtaacttggccttataattaggctgaattatggcttcaaggtctacaatttatgtgtatggttcacagcctagcttctatttacatttgaaaatacagatttttaccaactttggattcttttttagttatatgtttgtctttcctttttaaattgttcaaaactattttttaatggtcaagttactaacacttgaaaatcagatactgcaccaaatacagtgtttttccgtagtgtttttaatgagtgcacctattactactgtgcgagaattcatgttttaccagtcattgttatattacaaacagacttgcatgattaaccagttgttacacttactttttcaagttggagtatatatgactcagtgcagactggtctctcttatgtgaatgcacacatgcagaaatgcagagtcaattttacatgcccataaagacatttgtaaagaattcagctcttatggtctgttgtataaatgtgtatctaggcactttattataactggaatttgacctcacagatgttacaacttgatcagtcgtttgacctaatttgtggtagctatctgtatgttttgcaatcttaatacagacatgctttccaaaaagattaatacagaaccatcctgccgttttggataagtctatccagctgtggaaagggcaacctgtggtttctctgtactggtgtttaatgggggaagaatatgaacagctttaaagagctgtgtattgtggttactactattaaaaaataagatctgcacgagtctgactggcctttgggtggcctttgtggacggctcgtagctggaaagtgttgatctgggttttctggcattcttttaagttaaaaagttaacatcgggacatgggtttgatcttttgttgtacctgatgacagtgcagagattctccacagctggataaaaatgtcacaaagctacttactgtacatgggcagtatcagatttcaaatcctaatatttcagctgtgcttttaatactcaaaatattaggggatggggtgttgaagctttcccttttttgcttttaacaatttatagaatttaacagatgtactgtctttcatgtggcctcacatttaaagttatgagaacatacacatggtttacaacttttactatatacctttccttggccaccaagtattttaaaagtgtgccaccttttaacctttactttttttaagttgaaggtgatactttttctatatatgatgaaactcatgtcaactgaagtgagtgtaatctcagatatcaacattattatattttaaaatcacgctatggaaatatcacctgaattctgtcatttgtcagatttacagtacctttttttctttaacttttagcattaaataaaaataaaattgggagcactgaa

SEQ ID NO: 67 - DNA, 4956 bp, Homo sapien
gcggtggcggtggcggccgcgtcccggcggcagtcgtgctacctgtgtgacctgccccgcatgccctgggccatgatctgggacttcaccgaacccgtctgccgcggctgcgtcaactacgagggcgccgaccgcgtcgagttcgtcatcgagacggcgcggcagctcaagcgggcgcacggctgcttcccggagggtcgctccccacccggcgccgcggcctcggccgccgccaagccgccgccgctctccgccaaggacatccttttgcagcagcagcagcagcttggccacggcggccccgaggcggccccgcgcgcgccgcaggccttggagcgctacccgttggcggccgcggccgagaggcccccgcgcctcggctctgacttcggcagcagccgcccggcagcgagcctggcccagccgccgacgccgcagccgccgcccgtgaacggcatcctggtgcccaacggcttctccaagctagaggagccgcccgagctgaatcgccagagcccgaacccgcggcgcggccacgcggtgccgcccaccctggtgccgctcatgaacggctcggccacgccgctgcccaccgcgctcggcctcggcggccgcgctgccgcctccttagccgcggtgtccggaaccgcggccgccagcctgggctccgcgcagcccaccgatctgggcgcccacaagcggccggcatccgtgtcgagcagcgctgccgtggagcacgagcagcgtgaggcggcagccaaggagaaacaaccgccgccgcctgcgcaccggggcccggccgacagcctgtccaccgcggccggggccgccgagctgagcgcggaaggtgcgggcaagagccgcgggtctggagagcaggactgggtcaacaggcccaagaccgtgcgcgacacgctgctggcgctgcaccagcacggccactcggggcccttcgagagcaagtttaagaaggagccggccctgactgcaggcaggttgttgggtttcgaggccaacggggccaacgggtctaaagcaggtaggggcggctgtgaagtgagggggtctaggggagaaaaggggacggagagcagaggaagggtggttctttggattcaccattttaccccagcccagaaacaacaaacaccccacttcctgatctgcctgaggcggaaccagtgcttggtggcaacgtgttcatgtgctgaagcagcataacagagatgagtcagactgggctgatacgctctgacacggggttttcctttcccagcacattcttggatgggagcatgagggcaccagtcaccttttaacctattgggggacattagcagtcacatgttgagtgcaaacgaggttgcaagaacagcaaggaaaaggaagccctctccagaaccagaaggtgaagtcgggccccctaagatcaacggagaggcccagccgtggctgtccacatccacagaggggctcaagatccccatgactcctacatcctcttttgtgtctccgccaccacccactgcctcacctcattccaaccggaccacaccgcctgaagcggcccagaatggccagtcccccatggcagccctgatcttagtagcagacaatgcagggggcagtcatgcctcaaaagatgccaaccaggttcactccactaccaggaggaatagcaacagtccgccctctccgtcctctatgaaccaaagaaggctgggccccagagaggtggggggccagggagcaggcaacacaggaggactggagccagtgcaccctgccagcctcccggactcctctctggcaaccagtgccccgctgtgctgcaccctctgccacgagcggctggaggacacccattttgtgcagtgcccgtccgtcccttcgcacaagttctgcttcccttgctccagacaaagcatcaaacagcagggagctagtggagaggtctattgtcccagtggggaaaaatgccctcttgtgggctccaatgtcccctgggcctttatgcaaggggaaattgcaaccatccttgctggagatgtgaaagtgaaaaaagagagagactcgtgacttttccggtttcagaaaaacccaatgattacccttaattaaaactgcttgaattgtatatatatctccatatatatatatatccaagacaagggaaatgtagacttcataaacatggctgtataattttgattttttttgaatacattgtgtttctatattttttttgacgacaaaaggtatgtacttataaagacatttttttcttttgttaacgttattagcatatctttgtgctttattatcctggtgacagttaccgttctatgtaggctgtgacttgcgctgcttttttagagcacttggcaaatcagaaatgcttctagctgtatttgtatgcacttattttaaaaagaaaaaaaaagccaaatacattttctgacattgtaagattgccttactgtctgtcattccttattgctggcccctttctcaggccggaggccaagtggtggagaaggaaaggaaatgatcgaacgggcatgttgtcaagtgggcatgccactgggaaataccaccagtttaccctgaaacattgtcctcagaggagtaggaaagtggattttgaatctctattttgctcaaaagttcagttcctgagatactgatgactgagagtgctgctgggaaattttcaggattgtgtggtcttttggggttttttgtttttttttttttaagacaaagttgaccgctgttcactgtccacgtgatcagttgtaagattacaatgctgcatgctagttggttacataagatacaattccagtgatggaaggcggttataatggatggtggtgtgtacaagatggcactgccatctttgagcagagcccagctctgcagcgccacttcatctttttaaacaccctagaggtctgtttgttgttgctgttgtcctttattttgaaagagttgcaagagaagttacagtccaggtgaacttggagattgtgggattggttttgtttctgttttgttttgtttatcatttacctgtagtgctattgctgttgatactatcacctataccctgtttctagtgagtgctgaatacagtatggtacaatgacagtaacagccgcgtggtgctgccaggactgcccttgggcatatcagtgacagcccaaatgtgggtggaggaaacctgtaatttccttcttaacatgtgtttgaaataccaagtgaataatactgttctggaaaaaaatgataaactagtggaaattaaagaaattaagggttttatataatagacaggccccacctctcaaaatatttttagaagtctttttgtaaactaatttcttttgatcactattttgcatcagtaaaatgatttttttaaaaccaataaatcatcaattattagaaatagttgtctcacagtgatactggtttttcttttgtgctgttatgatttaacattgacaggaacactattttaaatccttacgttcaggtgtttgtaacttggccttataattaggctgaattatggcttcaaggtctacaatttatgtgtatggttcacagcctagcttctatttacatttgaaaatacagatttttaccaactttggattcttttttagttatatgtttgtctttcctttttaaattgttcaaaactattttttaatggtcaagttactaacacttgaaaatcagatactgcaccaaatacagtgtttttccgtagtgtttttaatgagtgcacctattactactgtgcgagaattcatgttttaccagtcattgttatattacaaacagacttgcatgattaaccagttgttacacttactttttcaagttggagtatatatgactcagtgcagactggtctctcttatgtgaatgcacacatgcagaaatgcagagtcaattttacatgcccataaagacatttgtaaagaattcagctcttatggtctgttgtataaatgtgtatctaggcactttattataactggaatttgacctcacagatgttacaacttgatcagtcgtttgacctaatttgtggtagctatctgtatgttttgcaatcttaatacagacatgctttccaaaaagattaatacagaaccatcctgccgttttggataagtctatccagctgtggaaagggcaacctgtggtttctctgtactggtgtttaatgggggaagaatatgaacagctttaaagagctgtgtattgtggttactactattaaaaaataagatctgcacgagtctgactggcctttgggtggcctttgtggacggctcgtagctggaaagtgttgatctgggttttctggcattcttttaagttaaaaagttaacatcgggacatgggtttgatcttttgttgtacctgatgacagtgcagagattctccacagctggataaaaatgtcacaaagctacttactgtacatgggcagtatcagatttcaaatcctaatatttcagctgtgcttttaatactcaaaatattaggggatggggtgttgaagctttcccttttttgcttttaacaatttatagaatttaacagatgtactgtctttcatgtggcctcacatttaaagttatgagaacatacacatggtttacaacttttactatatacctttccttggccaccaagtattttaaaagtgtgccaccttttaacctttactttttttaagttgaaggtgatactttttctatatatgatgaaactcatgtcaactgaagtgagtgtaatctcagatatcaacattattatattttaaaatcacgctatggaaatatcacctgaattctgtcatttgtcagatttacagtacctttttttctttaacttttagcattaaataaaaataaaattgggagcactgaa

SEQ ID NO: 68 - DNA, 4442 bp, Homo sapien
gcggtggcggtggcggccgcgtcccggcggcagtcgtgctacctgtgtgacctgccccgcatgccctgggccatgatctgggacttcaccgaacccgtctgccgcggctgcgtcaactacgagggcgccgaccgcgtcgagttcgtcatcgagacggcgcggcagctcaagcgggcgcacggctgcttcccggagggtcgctccccacccggcgccgcggcctcggccgccgccaagccgccgccgctctccgccaaggacatccttttgcagcagcagcagcagcttggccacggcggccccgaggcggccccgcgcgcgccgcaggccttggagcgctacccgttggcggccgcggccgagaggcccccgcgcctcggctctgacttcggcagcagccgcccggcagcgagcctggcccagccgccgacgccgcagccgccgcccgtgaacggcatcctggtgcccaacggcttctccaagctagaggagccgcccgagctgaatcgccagagcccgaacccgcggcgcggccacgcggtgccgcccaccctggtgccgctcatgaacggctcggccacgccgctgcccaccgcgctcggcctcggcggccgcgctgccgcctccttagccgcggtgtccggaaccgcggccgccagcctgggctccgcgcagcccaccgatctgggcgcccacaagcggccggcatccgtgtcgagcagcgctgccgtggagcacgagcagcgtgaggcggcagccaaggagaaacaaccgccgccgcctgcgcaccggggcccggccgacagcctgtccaccgcggccggggccgccgagctgagcgcggaaggtgcgggcaagagccgcgggtctggagagcaggactgggtcaacaggcccaagaccgtgcgcgacacgctgctggcgctgcaccagcacggccactcggggcccttcgagagcaagtttaagaaggagccggccctgactgcagttgcaagaacagcaaggaaaaggaagccctctccagaaccagaaggtgaagtcgggccccctaagatcaacggagaggcccagccgtggctgtccacatccacagaggggctcaagatccccatgactcctacatcctcttttgtgtctccgccaccacccactgcctcacctcattccaaccggaccacaccgcctgaagcggcccagaatggccagtcccccatggcagccctgatcttagtagcagacaatgcagggggcagtcatgcctcaaaagatgccaaccaggttcatcctctctggcaaccagtgccccgctgtgctgcaccctctgccacgagcggctggaggacacccattttgtgcagtgcccgtccgtcccttcgcacaagttctgcttcccttgctccagacaaagcatcaaacagcagggagctagtggagaggtctattgtcccagtggggaaaaatgccctcttgtgggctccaatgtcccctgggcctttatgcaaggggaaattgcaaccatccttgctggagatgtgaaagtgaaaaaagagagagactcgtgacttttccggtttcagaaaaacccaatgattacccttaattaaaactgcttgaattgtatatatatctccatatatatatatatccaagacaagggaaatgtagacttcataaacatggctgtataattttgattttttttgaatacattgtgtttctatattttttttgacgacaaaaggtatgtacttataaagacatttttttcttttgttaacgttattagcatatctttgtgctttattatcctggtgacagttaccgttctatgtaggctgtgacttgcgctgcttttttagagcacttggcaaatcagaaatgcttctagctgtatttgtatgcacttattttaaaaagaaaaaaaaagccaaatacattttctgacattgtaagattgccttactgtctgtcattccttattgctggcccctttctcaggccggaggccaagtggtggagaaggaaaggaaatgatcgaacgggcatgttgtcaagtgggcatgccactgggaaataccaccagtttaccctgaaacattgtcctcagaggagtaggaaagtggattttgaatctctattttgctcaaaagttcagttcctgagatactgatgactgagagtgctgctgggaaattttcaggattgtgtggtcttttggggttttttgtttttttttttttaagacaaagttgaccgctgttcactgtccacgtgatcagttgtaagattacaatgctgcatgctagttggttacataagatacaattccagtgatggaaggcggttataatggatggtggtgtgtacaagatggcactgccatctttgagcagagcccagctctgcagcgccacttcatctttttaaacaccctagaggtctgtttgttgttgctgttgtcctttattttgaaagagttgcaagagaagttacagtccaggtgaacttggagattgtgggattggttttgtttctgttttgttttgtttatcatttacctgtagtgctattgctgttgatactatcacctataccctgtttctagtgagtgctgaatacagtatggtacaatgacagtaacagccgcgtggtgctgccaggactgcccttgggcatatcagtgacagcccaaatgtgggtggaggaaacctgtaatttccttcttaacatgtgtttgaaataccaagtgaataatactgttctggaaaaaaatgataaactagtggaaattaaagaaattaagggttttatataatagacaggccccacctctcaaaatatttttagaagtctttttgtaaactaatttcttttgatcactattttgcatcagtaaaatgatttttttaaaaccaataaatcatcaattattagaaatagttgtctcacagtgatactggtttttcttttgtgctgttatgatttaacattgacaggaacactattttaaatccttacgttcaggtgtttgtaacttggccttataattaggctgaattatggcttcaaggtctacaatttatgtgtatggttcacagcctagcttctatttacatttgaaaatacagatttttaccaactttggattcttttttagttatatgtttgtctttcctttttaaattgttcaaaactattttttaatggtcaagttactaacacttgaaaatcagatactgcaccaaatacagtgtttttccgtagtgtttttaatgagtgcacctattactactgtgcgagaattcatgttttaccagtcattgttatattacaaacagacttgcatgattaaccagttgttacacttactttttcaagttggagtatatatgactcagtgcagactggtctctcttatgtgaatgcacacatgcagaaatgcagagtcaattttacatgcccataaagacatttgtaaagaattcagctcttatggtctgttgtataaatgtgtatctaggcactttattataactggaatttgacctcacagatgttacaacttgatcagtcgtttgacctaatttgtggtagctatctgtatgttttgcaatcttaatacagacatgctttccaaaaagattaatacagaaccatcctgccgttttggataagtctatccagctgtggaaagggcaacctgtggtttctctgtactggtgtttaatgggggaagaatatgaacagctttaaagagctgtgtattgtggttactactattaaaaaataagatctgcacgagtctgactggcctttgggtggcctttgtggacggctcgtagctggaaagtgttgatctgggttttctggcattcttttaagttaaaaagttaacatcgggacatgggtttgatcttttgttgtacctgatgacagtgcagagattctccacagctggataaaaatgtcacaaagctacttactgtacatgggcagtatcagatttcaaatcctaatatttcagctgtgcttttaatactcaaaatattaggggatggggtgttgaagctttcccttttttgcttttaacaatttatagaatttaacagatgtactgtctttcatgtggcctcacatttaaagttatgagaacatacacatggtttacaacttttactatatacctttccttggccaccaagtattttaaaagtgtgccaccttttaacctttactttttttaagttgaaggtgatactttttctatatatgatgaaactcatgtcaactgaagtgagtgtaatctcagatatcaacattattatattttaaaatcacgctatggaaatatcacctgaattctgtcatttgtcagatttacagtacctttttttctttaacttttagcattaaataaaaataaaattgggagcactgaa

SEQ ID NO: 69 - DNA, 2056 bp, Homo sapien
cccgcccgcgcggtcgtcggagcgcggctcagcggcgcggcggagactcggcacggcggcggccaggcgcaggcgggcgggcggagcagcggacggcgccgaggccgccccacgcgccgggctcgcggcggcgcagcgcgccggagtggtcggggcccgcggccgctcgcgcctctcgatgggcagctcgcacttgctcaacaagggcctgccgcttgtaagactttgaccccgacgcaggcttcagtgattgccgcggatcagaagcctgagcactttggctcgagacaattaaggacgtgggatgaggctccgagacaggacgcggttctgcctggggatcctgaagataaaaagctttgaaaagtcgaattcatggtcgtggaagctgagcccatattaagagatgtcaggcgtccgacctccgatcatgaacgggcccctgcacccgcggcccctggtggcattgctggatggccgggactgcacagtggagatgcccatcctgaaggacgtggccactgtggccttctgcgacgcgcagtccacgcaggagatccatgagaaggtcctgaacgaggctgtgggggccctgatgtaccacaccatcactctcaccagggaggacctggagaagttcaaagccctccgcatcatcgtccggattggcagtggttttgacaacatcgacatcaagtcggccggggatttaggcattgccgtctgcaacgtgcccgcggcgtctgtggaggagacggccgactcgacgctgtgccacatcctgaacctgtaccggcgggccacctggctgcaccaggcgctgcgggagggcacacgagtccagagcgtcgagcagatccgcgaggtggcgtccggcgctgccaggatccgcggggagaccttgggcatcatcggacttggtcgcgtggggcaggcagtggcgctgcgggccaaggccttcggcttcaacgtgctcttctacgacccttacttgtcggatggcgtggagcgggcgctggggctgcagcgtgtcagcaccctgcaggacctgctcttccacagcgactgcgtgaccctgcactgcggcctcaacgagcacaaccaccacctcatcaacgacttcaccgtcaagcagatgagacaaggggccttcctggtgaacacagcccggggtggcctggtggatgagaaggcgctggcccaggccctgaaggagggccggatccgcggcgcggccctggatgtgcacgagtcggaacccttcagctttagccagggccctctgaaggatgcacccaacctcatctgcaccccccatgctgcatggtacagcgagcaggcatccatcgagatgcgagaggaggcggcacgggagatccgcagagccatcacaggccggatcccagacagcctgaagaacttctgccctgtgtccttcgcgttcctcgttaagcagaagaagtcagtagttattctcccatgaacgttcttgtctgtgtacagtttttagaacattacaaaggatctgtttgcttagctgtcaacaaaaagaaaacctgaaggagcatttggaagtcaatttgaggtttttttttttggtttttttttttttgtatgttggaacgtgccccagaatgaggcagttggcaaacttctcaggacaatgaatccttcccgtttttctttttatgccacacagtgcattgttttttctacctgcttgtcttatttttagaataatttagaaaaacaaaacaaaggctgtttttcctaattttggcatgaacccccccttgttccaaatgaagacggcatcacgaagcagctccaaaaggaaaagcttgggcggtgcccagcgtgcccgctgcccatcgacgtctgtcctggggacgtggagggtggcagcgtccccgcctgcaccagtgccgtcctgctgatgtggtaggctagcaatattttggttaaaatcatgtttgtgactgtaaccatttgtatgaattattttaaagaaataaaaatcctggaaagagccagcgtgcccagcaaatctattctg

SEQ ID NO: 70 - DNA, 1862 bp, Homo sapien
cagtgggggagtttgccgcccgctgcggggtgaggatggagccacgggctctaggcctgccttgcctcggtcctgtgaggggctgctcaacctcctcagcccttctttgggcagggctcctgaccaaccaggagagagtgaggccccagtgtctgtgagtggtccccatgggccctggccatggagtcatggcatcccgtccagacctgcagcccctacagcaccttgggaccccaggcagccctgggttggatgttcagccgcaagaggagacacccccacaggggcagtatcagcctgcagctcctggggctacagaccctttggctggaaggggccaggcagcatgtccccccatcagggctcctcccacgagggacttggagattaaatcccttgggctcccacacccgccgctgtcaggagcccctggtgtgtctgatggtcccggggctgtgctcttgagctcagccagcctgccgagcagagcggggccgtggggtctgtggttcccaggcagggccccccacagggggttccagtgcccagccacctcccctccgtacccagccacagcactcaggctgcactgaccatgcctgtgctgttcccagctttagccagggccctctgaaggatgcacccaacctcatctgcaccccccatgctgcatggtacagcgagcaggcatccatcgagatgcgagaggaggcggcacgggagatccgcagagccatcacaggccggatcccagacagcctgaagaactgtgtcaacaaggaccatctgacagccgccacccactgggccagcatggaccccgccgtcgtgcaccctgagctcaatggggctgcctataggtaccctccgggcgtggtgggcgtggcccccactggcatcccagctgctgtggaaggtatcgtccccagcgccatgtccctgtcccacggcctgccccctgtggcccacccgccccacgccccttctcctggccaaaccgtcaagcccgaggcggatagagaccacgccagtgaccagttgtagcccgggaggagctctccagcctcggcgcctgggcagagggcccggaaaccctcggaccagagtgtgtggaggaggcatctgtgtggtggccctggcactgcagagactggtccgggctgtcaggaggcgggagggggcagcgctgggcctcgtgtcgcttgtcgtcgtccgtcctgtgggcgctctgccctgtgtccttcgcgttcctcgttaagcagaagaagtcagtagttattctcccatgaacgttcttgtctgtgtacagtttttagaacattacaaaggatctgtttgcttagctgtcaacaaaaagaaaacctgaaggagcatttggaagtcaatttgaggtttttttttttggtttttttttttttgtatgttggaacgtgccccagaatgaggcagttggcaaacttctcaggacaatgaatccttcccgtttttctttttatgccacacagtgcattgttttttctacctgcttgtcttatttttagaataatttagaaaaacaaaacaaaggctgtttttcctaattttggcatgaacccccccttgttccaaatgaagacggcatcacgaagcagctccaaaaggaaaagcttgggcggtgcccagcgtgcccgctgcccatcgacgtctgtcctggggacgtggagggtggcagcgtccccgcctgcaccagtgccgtcctgctgatgtggtaggctagcaatattttggttaaaatcatgtttgtgactgtaaccatttgtatgaattattttaaagaaataaaaatcctggaaagagccagcgtgcccagcaaatctattctg

SEQ ID NO: 71 - DNA, 1168 bp, Homo sapien
ctgcatggtacagcgagcaggcatccatcgagatgcgagakgaggcacccttcagctttagccagggccctctgaaggatgcacccaacctcatctgcaccccccatgctgcatggtacatggaccccgccgtcgtgcaccctgagctcaatggggctgcctataggtaccctccgggcgtggtgggcgtggcccccactggcatcccagctgctgtggaaggtatcgtccccagcgccatgtccctgtcccacggcctgccccctgtggcccacccgccccacgccccttctcctggccaaaccgtcaagcccgaggcggatagagaccacgccagtgaccagttgtagcccgggaggagctctccagcctcggcgcctgggcagagggcccggaaaccctcggaccagagtgtgtggaggaggcatctgtgtggtggccctggcactgcagagactggtccgggctgtcaggaggcgggagggggcagcgctgggcctcgtgtcgcttgtcgtcgtccgtcctgtgggcgctctgccctgtgtccttcgcgttcctcgttaagcagaagaagtcagtagttattctcccatgaacgttcttgtctgtgtacagtttttagaacattacaaaggatctgtttgcttagctgtcaacaaaaagaaaacctgaaggagcatttggaagtcaatttgaggtttttttttttggtttttttttttttgtatgttggaacgtgccccagaatgaggcagttggcaaacttctcaggacaatgaatccttcccgtttttctttttatgccacacagtgcattgttttttctacctgcttgtcttatttttagaataatttagaaaaacaaaacaaaggctgtttttcctaattttggcatgaacccccccttgttccaaatgaagacggcatcacgaagcagctccaaaaggaaaagcttgggcggtgcccagcgtgcccgctgcccatcgacgtctgtcctggggacgtggagggtggcagcgtccccgcctgcaccagtgccgtcctgctgatgtggtaggctagcaatattttggttaaaatcatgtttgtgactgtaaccatttgtatgaattattttaaagaaataaaaatcctggaaagagccagcgtgcccagcaaatctattctg

SEQ ID NO: 72 - DNA, 1352 bp, Homo sapien
gggcatcttgtggggtgggacggcttgtggggtggggcatctcgggaggtggggcatctctggggcccggccacttgggaggcggggcatcctgggggcggggcatctcagagggcgcctccggaggctggagtatcttgggaggtgggagcaggtggcagagaggcttcccacagctggctggaggcgtgatcctgggtgtggccctgtggctccgccatgacccgcagaccaccaacctcctgtatctggagctgggagacaagcccgcgcccaacaccttctatgtaggcatctacatcctcatcgctgtgggcgctgtcatgatgttcgttggcttcctgggctgctacggggccatccaggaatcccagtgcctgctggggacgttcttcacctgcctggtcatcctgtttgcctgtgaggtggccgccggcatctggggctttgtcaacaaggaccagatcgccaaggatgtgaagcagttctatgaccaggccctacagcaggccgtggtggatgatgacgccaacaacgccaaggctgtggtgaagaccttccacgagacgcttgactgctgtggctccagcacactgactgctttgaccacctcagtgctcaagaacaatttgtgtccctcgggcagcaacatcatcagcaacctcttcaaggaggactgccaccagaagatcgatgacctcttctccgggaagctgtacctcatcggcattgctgccatcgtggtcgctgtgatcatgatcttcgagatgatcctgagcatggtgctgtgctgtggcatccggaacagctccgtgtactgaggccccgcagctctggccacagggacctctgcagtgccccctaagtgacccggacacttccgagggggccatcaccgcctgtgtatataacgtttccggtattactctgctacacgtagcctttttacttttggggttttgtttttgttctgaactttcctgttaccttttcagggctgacgtcacatgtaggtggcgtgtatgagtggagacgggcctgggtcttggggactggagggcaggggtccttctgccctggggtcccagggtgctctgcctgctcagccaggcctctcctgggagccactcgcccagagactcagcttggccaacttggggggctgtgtccacccagcccgcccgtcctgtgggctgcacagctcaccttgttccctcctgccccggttcgagagccgagtctgtgggcactctctgccttcatgcacctgtcctttctaacacgtcgccttcaactgtaatcacaacatcctgactccgtcatttaataaagaaggaacatcaggcatgcta

SEQ ID NO: 73 - DNA, 1445 bp, Homo sapien
agatgagtggggcagtcacatcccaccttccccaagccgggctgttctgcacagcctgcttgggacgctggtgggagtcactgtggccttcggcactgccctggcagtgggggcagctaggccatttgggaggggctcgccttccccaggcccggccctgggacctcagccgttgcttagtggtggcctgcttcagcccaggcatgtgggagaggcaccagacacaggatgtccctctgccagcccctgaagccccgtcccctgacgagctggctggaggcgtgatcctgggtgtggccctgtggctccgccatgacccgcagaccaccaacctcctgtatctggagctgggagacaagcccgcgcccaacaccttctatgtaggcatctacatcctcatcgctgtgggcgctgtcatgatgttcgttggcttcctgggctgctacggggccatccaggaatcccagtgcctgctggggacgttcttcacctgcctggtcatcctgtttgcctgtgaggtggccgccggcatctggggctttgtcaacaaggaccagatcgccaaggatgtgaagcagttctatgaccaggccctacagcaggccgtggtggatgatgacgccaacaacgccaaggctgtggtgaagaccttccacgagacgcttgactgctgtggctccagcacactgactgctttgaccacctcagtgctcaagaacaatttgtgtccctcgggcagcaacatcatcagcaacctcttcaaggaggactgccaccagaagatcgatgacctcttctccgggaagctgtacctcatcggcattgctgccatcgtggtcgctgtgatcatgatcttcgagatgatcctgagcatggtgctgtgctgtggcatccggaacagctccgtgtactgaggccccgcagctctggccacagggacctctgcagtgccccctaagtgacccggacacttccgagggggccatcaccgcctgtgtatataacgtttccggtattactctgctacacgtagcctttttacttttggggttttgtttttgttctgaactttcctgttaccttttcagggctgacgtcacatgtaggtggcgtgtatgagtggagacgggcctgggtcttggggactggagggcaggggtccttctgccctggggtcccagggtgctctgcctgctcagccaggcctctcctgggagccactcgcccagagactcagcttggccaacttggggggctgtgtccacccagcccgcccgtcctgtgggctgcacagctcaccttgttccctcctgccccggttcgagagccgagtctgtgggcactctctgccttcatgcacctgtcctttctaacacgtcgccttcaactgtaatcacaacatcctgactccgtcatttaataaagaaggaacatcaggcatgcta

SEQ ID NO: 74 - DNA, 2290 bp, Homo sapien
gtcaggaccaaaaaaggcaacgcgcctctcctgacctgtaccccggagtgaacccaaccttgcaacccaggagtgtcagggcctgaggggagggagacctggctcctgggtgccgtgcccgtaaggaggtggccacctgcagggcattcctggcagaggcttcatctggccaggtaggaggctgggtggccgagccccaaatctgggtgtgttctctgcctggcggtgggtcctgccccaggcaccttctcctctgggctggctgggcagggacaatgggcctggctgcgaggagggggcctgggctgccttctgcattgcctcggtgacgggagatggcccctgcctgctgagggataggggagtgggcaggcagtgagagacactgacagctgtcccgcgggtacagggccctgtctgggtggccaggcccatgtctcgggcccacagtgcgccccccacccttggacggcgccttctccctccccaggtgcatgctgcccagccagggagcgtgggggagttcgggagggctggcctacacgccctggtccagctgtcccaggtggggtgctgggcttcagccctcagcccagggcctaggaatccaacttgatcctccccacacagcagccaggttcaaatgcaggtcccgtaacggaagtgctgctgtgcagcccagattggggggcaggagccagcagggcccccccaccctcttctcgcaccacactggggaggcagcattggttccagttccggttcctgggctgccctctcaaccccggcctacagtggggcccaccctgtgccttctgatgccactcccaccccacgccaagtcccagaggctttgggagcgggtgaaggcggtgggtggcgggtggcaggtgcaggcggtgggtggtgggtgtggcaggtggcgggccccaccgcaggtgtcatccctgcgaagcacctgtcgccagcactcagagcgctcatgaggtgcccagtccccatgtggcctccttagtctccgtcctgtgtcatggaagaggtaactgaggcacagaaaactcaccaggccaggctgggatgtgaggtcccttgctgctcatccctggcagtcagcaaccctacatcttcccagctgggcggcccgtggtgggttcggcacccaggaccctccggggtcttgggctgtggcgagtgtgtaggcacccacctggtgtctctctccccgcaaggcatctacatcctcatcgctgtgggcgctgtcatgatgttcgttggcttcctgggctgctacggggccatccaggaatcccagtgcctgctggggacgttcttcacctgcctggtcatcctgtttgcctgtgaggtggccgccggcatctggggctttgtcaacaaggaccagatcgccaaggatgtgaagcagttctatgaccaggccctacagcaggccgtggtggatgatgacgccaacaacgccaaggctgtggtgaagaccttccacgagacgcttgactgctgtggctccagcacactgactgctttgaccacctcagtgctcaagaacaatttgtgtccctcgggcagcaacatcatcagcaacctcttcaaggaggactgccaccagaagatcgatgacctcttctccgggaagctgtacctcatcggcattgctgccatcgtggtcgctgtgatcatgatcttcgagatgatcctgagcatggtgctgtgctgtggcatccggaacagctccgtgtactgaggccccgcagctctggccacagggacctctgcagtgccccctaagtgacccggacacttccgagggggccatcaccgcctgtgtatataacgtttccggtattactctgctacacgtagcctttttacttttggggttttgtttttgttctgaactttcctgttaccttttcagggctgacgtcacatgtaggtggcgtgtatgagtggagacgggcctgggtcttggggactggagggcaggggtccttctgccctggggtcccagggtgctctgcctgctcagccaggcctctcctgggagccactcgcccagagactcagcttggccaacttggggggctgtgtccacccagcccgcccgtcctgtgggctgcacagctcaccttgttccctcctgccccggttcgagagccgagtctgtgggcactctctgccttcatgcacctgtcctttctaacacgtcgccttcaactgtaatcacaacatcctgactccgtcatttaataaagaaggaacatcaggcatgcta

SEQ ID NO: 75 - DNA, 1033 bp, Homo sapien
ccattgtgctggaaagagcgcgcaacggcggcgacggcggcgaccccaccgcgcatcctgccaggcctccgcgcccagccgcccacgcgcccccgcgccccgcgccccgaccctttcttcgcgcccccgcccctcggcccgccaggcccccttgccggccacccgccaggccccgcgccggcccgcccgccgcccaggaccggcccgcgccccgcaggccgcccgccgcccgcgccgccatgggagtggagggctgcaccaagtgcatcaagtacctgctcttcgtcttcaatttcgtcttctggctggctggaggcgtgatcctgggtgtggccctgtggctccgccatgacccgcagaccaccaacctcctgtatctggagctgggagacaagcccgcgcccaacaccttctatgtaggcatctacatcctcatcgctgtgggcgctgtcatgatgttcgttggcttcctgggctgctacggggccatccaggaatcccagtgcctgctggggacgttcttcacctgcctggtcatcctgtttgcctgtgaggtggccgccggcatctggggctttgtcaacaaggaccagatcgccaaggatgtgaagcagttctatgaccaggccctacagcaggccgtggtggatgatgacgccaacaacgccaaggctgtggtgaagaccttccacgagacgcttgactgctgtggctccagcacactgactgctttgaccacctcagtgctcaagaacaatttgtgtccctcgggcagcaacatcatcagcaacctcttcaaggaggactgccaccagaagatcgatgacctcttctccgggaagctgtacctcatcggcattgctgccatcgtggtcgctgtgatcatgatcttcgagatgatcctgagcatggtgctgtgctgtggcatccggaacagctccgtgtactgaggccccgcagctctggccacagggacctctgcagtgccccctaagtgacccggacacaatgttcaggacacgaatgttcaggc

SEQ ID NO: 76 - DNA, 1190 bp, Homo sapien
  misc_feature (1081)..(1081): n=a, c, g or t
  misc_feature (1122)..(1122): n=a, c, g or t
ccattgtgctggaaagagcgcgcaacggcggcgacggcggcgaccccaccgcgcatcctgccaggcctccgcgcccagccgcccacgcgcccccgcgccccgcgccccgaccctttcttcgcgcccccgcccctcggcccgccaggcccccttgccggccacccgccaggccccgcgccggcccgcccgccgcccaggaccggcccgcgccccgcaggccgcccgccgcccgcgccgccatgggagtggagggctgcaccaagtgcatcaagtacctgctcttcgtcttcaatttcgtcttctggctggctggaggcgtgatcctgggtgtggccctgtggctccgccatgacccgcagaccaccaacctcctgtatctggagctgggagacaagcccgcgcccaacaccttctatgtaggcatctacatcctcatcgctgtgggcgctgtcatgatgttcgttggcttcctgggctgctacggggccatccaggaatcccagtgcctgctggggacgttcttcacctgcctggtcatcctgtttgcctgtgaggtggccgccggcatctggggctttgtcaacaaggaccagatcgccaaggatgtgaagcagttctatgaccaggccctacagcaggccgtggtggatgatgacgccaacaacgccaaggctgtggtgaagaccttccacgagacgcttgactgctgtggctccagcacactgactgctttgaccacctcagtgctcaagaacaatttgtgtccctcgggcagcaacatcatcagcaacctcttcaaggaggactgccaccagaagatcgatgacctcttctccgggaagctgtacctcatcggcattgctgccatcgtggtcgctgtgatcatgatcttcgagatgatcctgagcatggtgctcaatgataatctttgtattataggaaaagtaaggattagtggaagacagggtttctatccaaaccaacaacataaacggcaatataattgttaaaattagcctttatatgccatatgttatgcctggtacatagtagactcccaataaatctttggtggcttganttgaagaggtaaagttcagatgaaatctttggcctcctttnctggccggggacagtaagattctcatgctaagcaataaaatggtcttatctcttaataatccccatcc

SEQ ID NO: 77 - DNA, 871 bp, Homo sapien
ccattgtgctggaaagagcgcgcaacggcggcgacggcggcgaccccaccgcgcatcctgccaggcctccgcgcccagccgcccacgcgcccccgcgccccgcgccccgaccctttcttcgcgcccccgcccctcggcccgccaggcccccttgccggccacccgccaggccccgcgccggcccgcccgccgcccaggaccggcccgcgccccgcaggccgcccgccgcccgcgccgccatgggagtggagggctgcaccaagtgcatcaagtacctgctcttcgtcttcaatttcgtcttctggctggctggaggcgtgatcctgggtgtggccctgtggctccgccatgacccgcagaccaccaacctcctgtatctggagctgggagacaagcccgcgcccaacaccttctatgtaggcatctacatcctcatcgctgtgggcgctgtcatgatgttcgttggcttcctgggctgctacggggccatccaggaatcccagtgcctgctggggacgttcttcacctgcctggtcatcctgtttgcctgtgaggtggccgccggcatctggggctttgtcaacaaggaccagatcgccaaggatgtgaagcagttctatgaccaggccctacagcaggccgtggtggatgatgacgccaacaacgccaaggctgtggtgaagaccttccacgagacgcttgactgctgtggctccagcacactgactgctttgaccacctcagtgctcaagaacaatttgtgtccctcgggcagcaacatcatcagcaacctcttcaaggaggactgccaccagaagatcgatgacctcttctccgggaagctgtacctggccgcgaccacgctaagggc

SEQ ID NO: 78 - DNA, 1283 bp, Homo sapien
ggaatcacatcgagccactgaaaattcagtggctcgatgtgcttcagcgagaacccagacctttcccaaagctcaggattcttcgaaaagttgagaaaattgatgacttcaaagctgaagactttcagattgaagggtacaatccgcatccaactattaaaatggaaatggctgtttagggtgctttcaaaggagctcgaaggatattgtcagtctttaggggttgggctggatgccgaggtaaaagttctttttgctctaaaagaaaaaggaactaggtcaaaaatctgtccgtgacctatcagttattaatttttaaggatgttgccactggcaaatgtaactgtgccagttctttccataataaaaggctttgagttaactcactgagggtatctgacaatgctgaggttatgaacaaagtgaggagaatgaaatgtatgtgctcttagcaaaaacatgtatgtgcatttcaatcccacgtacttataaagaaggttggtgaatttcacaagctatttttggaatatttttagaatattttaagaatttcacaagctattccctcaaatctgagggagctgagtaacaccatcgatcatgatgtagagtgtggttatgaactttaaagttatagttgttttatatgttgctataataaagaagtgttctgcattcgtccacgctttgttcattctgtactgccacttatctgctcagttccttcctaaaatagattaaagaactctccttaagtaaacatgtgctgtattctggtttggatgctacttaaaagagtatattttagaaataatagtgaatatattttgccctatttttctcattttaactgcatcttatcctcaaaatataatgaccatttaggatagagtttttttttttttttttttaaacttttataaccttaaagggttattttaaaataatctatggactaccattttgccctcattagcttcagcatggtgtgacttctctaataatatgcttagattaagcaaggaaaagatgcaaaaccacttcggggttaatcagtgaaatatttttcccttcgttgcataccagatacccccggtgttgcacgactatttttattctgctaatttatgacaagtgttaaacagaacaaggaattattccaacaagttatgcaacatgttgcttattttcaaattacagtttaatgtctaggtgccagcccttgatatagctatttttgtaagaacatcctcctggactttgggttagttaaatcgtcgact

SEQ ID NO: 79 - DNA, 1169 bp, Homo sapien
ttcatttcttaattggcatttagtttagcatagtaattttttttttttaatttgctgccacttcagcagttttagtgtttagatgtgggagaggttaagtaagatctgtattgccctattatctctaaaagtggcttgtccctgcaggatagtgaatgcttgtctgtaccattggagttacacatttcattgagttgataccagcagatttttttcagggaaaaataatccaatctcataactacagcacctcaccacattctccctctcctaacagtgtagagacttagatttaattgcacctttcctttcaatagttatttctggtgggatgttgaagaaagctagtgggcaaaggattccgcttgaacagacactggtgatgggctcccaggcttggcggtggcttgctttctgcactgcagtaaaaccacgagagggcatctttggctctgggattaataattcatctgtcttctctgacctgtgaccttttctctcctttctcttaccctttcccggtagtgtgaagtgagggggtctctctccctccttctccttcctctgtgattcaccttcctttttaccctgccctgcggcggctccgccccttaccttcatggacgactcagaggtggagtcgaccgccagcatcttggcctctgtgaaggaacaagaggcccagtttgagaagctgacccgggcgctggaggaggaacggcgccacgtctcggcgcagctggaacgcgtccgggtctcaccacaagatgccaacccactcatggccaacggcacatccccctttcgaaagaaatgcaaaaaaaagagtatattttcaagccgtgtcgaactatttaaggaaagcaaaatcatttcctaaatgcatatcatttgtgagaatttctcattaatatcctgaatcattcatttcagctaaggcttcatgttgactcgatatgtcatctaggaaagtactatttcatggtccaaacctgttgccatagttggtaaggctttcctttaagtgtgaaatatttacatgaaattttctcttttaaagttctttatagggttagggtgtgggaaaatgctatattaataaatctgtagtgtttagtgtttatatgttcagaaccagagtagactggattgaaagatggactgggtct

SEQ ID NO: 80 - DNA, 406 bp, Homo sapien
gatgatcatatattagcatggttcataatcatgtcgacgcgcagtgtatgatattgcagaatcggcttacgtgtcgcgcgagtcctccggggtatggtcatgtacaccagcaaggaccgctatttctattttgggaagcttgatggccagatctcctctgcctaccccagccaagaggggcaggtgctggtgggcatctatggccagtatcaactccttggcatcaagagcattggctttgaatggaattatccactagaggagccgaccactgagccaccagttaatctcacatactcagcaaactcacccgtgggtcgctagggtggggtatggggccatccgagctgaggccatctgggtggtggtggctgatggtacctgcccggcggcgctcgaaacgccg

SEQ ID NO: 81 - DNA, 1902 bp, Homo sapien
tataggcgcctgggtttctaatctgtcgagcggcgcagtgtgatggatgagcggccgcccgggcaggtggcgagagccctgggatgcaccggccagaggccatgctgctgctgctcacgcttgccctcctggggggccccacctgggcagggaagatgtatggccctggaggaggcaagtatttcagcaccactgaagactacgaccatgaaatcacagggctgcgggtgtctgtaggtcttctcctggtgaaaagtgtccaggtgaaacttggagactcctgggacgtgaaactgggagccttaggtgggaatacccaggaagtcaccctgcagccaggcgaatacatcacaaaagtctttgtcgccttccaagctttcctccggggtatggtcatgtacaccagcaaggaccgctatttctattttgggaagcttgatggccagatctcctctgcctaccccagccaagaggggcaggtgctggtgggcatctatggccagtatcaactccttggcatcaagagcattggctttgaatggaattatccactagaggagccgaccactgagccaccagttaatctcacatactcagcaaactcacccgtgggtcgctagggtggggtatggggccatccgagctgaggccatctgggtggtggtggctgatggtactggagtaactgagtcgggacgctgaatctgaatccaccaataaataaagcttctgcagaatcagtgcatccaggattggtccttggatctggggtacaaccaaagccttccctgctccttggagacaaagtccccagtgctgcagcccagtgaactgagatgaggggtagggcaaaggtgactctgccgaggacagaaagagagcagcaccaccccctcagaggtgctgtggatctctgtgccagtcccacaatctttgaagagtcaggcttcaaggccgccactccccactgtccctcaccccaggcccacccagcgggcctctgctggccactcagtcccgggattctctgagtgctcaaggggcctcagggaagccactcactcatccattcactcagcaaacatttgccaaggccgtgtcctcaccaggctcgcctggcactgggggtataaagaagaggccaggtttcagctgagtgcgtatacactgtggtgggggctggtgcagaggcagatagtggcagttcactttgccatctgcatggatggggacacatgcaggtcattgtgcgtaggcacctgcccagaggtgaggtgagagggatgtgcttcagggaagtcttcctagaggaggcaatgtctgagctaagtcttaaaggatgaaggacaattggccaagtggagacaaagggaggaggggattacaggttgagggctcaacatgagcaaagacaggagatgcagatggctggggtaatttgtcacagtagcaacaggaaatcagtacaagccctggacctggcccattcttcatgtccccttcccaagcctccaagcccacatgggcacttgccaagatcagagctccaggggcctccagggacggggttttcagtcctttgggaccatgatccacagagagaaattgatcctacttgagacacaggaagcaacacatgtaatgcaacagccaagcacccaacgatcatctaatgcaacagccaaacacccagcgatcatctaatgcaacagccaaacacccagcgatcatctaatgcaacagccaaacacccagcgatcatctaatgcaacagccaaacacccagcgatcatctaatgcaacagccaaacacccagtgatcatctaatgcaacagccaaacacccagtgatcatctaatgcaacagccaaacagacaagtgatcatctaatgcaacagcca

SEQ ID NO: 82 - DNA, 1911 bp, Homo sapien
catgccgagcggcgcagtgtgatggatcggccgccgggcaggtggagggtgcccggcacaaccagacgcccagtcacggcgagagccctgggatgcaccggccagaggccatgctgctgctgctcacgcttgccctcctggggggccccacctgggcagggaagatgtatggccctggaggaggcaagtatttcagcaccactgaagactacgaccatgaaatcacagggctgcgggtgtctgtaggtcttctcctggtgaaaagtgtccaggtgaaacttggagactcctgggacgtgaaactgggagccttaggtgggaatacccaggaagtcaccctgcagccaggcgaatacatcacaaaagtctttgtcgccttccaagctttcctccggggtatggtcatgtacaccagcaaggaccgctatttctattttgggaagcttgatggccagatctcctctgcctaccccagccaagaggggcaggtgctggtgggcatctatggccagtatcaactccttggcatcaagagcattggctttgaatggaattatccactagaggagccgaccactgagccaccagttaatctcacatactcagcaaactcacccgtgggtcgctagggtggggtatggggccatccgagctgaggccatctgggtggtggtggctgatggtactggagtaactgagtcgggacgctgaatctgaatccaccaataaataaagcttctgcagaatcagtgcatccaggattggtccttggatctggggtacaaccaaagccttccctgctccttggagacaaagtccccagtgctgcagcccagtgaactgagatgaggggtagggcaaaggtgactctgccgaggacagaaagagagcagcaccaccccctcagaggtgctgtggatctctgtgccagtcccacaatctttgaagagtcaggcttcaaggccgccactccccactgtccctcaccccaggcccacccagcgggcctctgctggccactcagtcccgggattctctgagtgctcaaggggcctcagggaagccactcactcatccattcactcagcaaacatttgccaaggccgtgtcctcaccaggctcgcctggcactgggggtataaagaagaggccaggtttcagctgagtgcgtatacactgtggtgggggctggtgcagaggcagatagtggcagttcactttgccatctgcatggatggggacacatgcaggtcattgtgcgtaggcacctgcccagaggtgaggtgagagggatgtgcttcagggaagtcttcctagaggaggcaatgtctgagctaagtcttaaaggatgaaggacaattggccaagtggagacaaagggaggaggggattacaggttgagggctcaacatgagcaaagacaggagatgcagatggctggggtaatttgtcacagtagcaacaggaaatcagtacaagccctggacctggcccattcttcatgtccccttcccaagcctccaagcccacatgggcacttgccaagatcagagctccaggggcctccagggacggggttttcagtcctttgggaccatgatccacagagagaaattgatcctacttgagacacaggaagcaacacatgtaatgcaacagccaagcacccaacgatcatctaatgcaacagccaaacacccagcgatcatctaatgcaacagccaaacacccagcgatcatctaatgcaacagccaaacacccagcgatcatctaatgcaacagccaaacacccagcgatcatctaatgcaacagccaaacacccagtgatcatctaatgcaacagccaaacacccagtgatcatctaatgcaacagccaaacagacaagtgatcatctaatgcaacagcca

SEQ ID NO: 83 - DNA, 1852 bp, Homo sapien
atgcatgtcgagcggcgcagtgtgatggatcgtggtcgcggcgaggtggccatgctgctgctgctcacgcttgccctcctggggggccccacctgggcagggaagatgtatggccctggaggaggcaagtatttcagcaccactgaagactacgaccatgaaatcacagggctgcgggtgtctgtaggtcttctcctggtgaaaagtgtccaggtgaaacttggagactcctgggacgtgaaactgggagccttaggtgggaatacccaggaagtcaccctgcagccaggcgaatacatcacaaaagtctttgtcgccttccaagctttcctccggggtatggtcatgtacaccagcaaggaccgctatttctattttgggaagcttgatggccagatctcctctgcctaccccagccaagaggggcaggtgctggtgggcatctatggccagtatcaactccttggcatcaagagcattggctttgaatggaattatccactagaggagccgaccactgagccaccagttaatctcacatactcagcaaactcacccgtgggtcgctagggtggggtatggggccatccgagctgaggccatctgggtggtggtggctgatggtactggagtaactgagtcgggacgctgaatctgaatccaccaataaataaagcttctgcagaatcagtgcatccaggattggtccttggatctggggtacaaccaaagccttccctgctccttggagacaaagtccccagtgctgcagcccagtgaactgagatgaggggtagggcaaaggtgactctgccgaggacagaaagagagcagcaccaccccctcagaggtgctgtggatctctgtgccagtcccacaatctttgaagagtcaggcttcaaggccgccactccccactgtccctcaccccaggcccacccagcgggcctctgctggccactcagtcccgggattctctgagtgctcaaggggcctcagggaagccactcactcatccattcactcagcaaacatttgccaaggccgtgtcctcaccaggctcgcctggcactgggggtataaagaagaggccaggtttcagctgagtgcgtatacactgtggtgggggctggtgcagaggcagatagtggcagttcactttgccatctgcatggatggggacacatgcaggtcattgtgcgtaggcacctgcccagaggtgaggtgagagggatgtgcttcagggaagtcttcctagaggaggcaatgtctgagctaagtcttaaaggatgaaggacaattggccaagtggagacaaagggaggaggggattacaggttgagggctcaacatgagcaaagacaggagatgcagatggctggggtaatttgtcacagtagcaacaggaaatcagtacaagccctggacctggcccattcttcatgtccccttcccaagcctccaagcccacatgggcacttgccaagatcagagctccaggggcctccagggacggggttttcagtcctttgggaccatgatccacagagagaaattgatcctacttgagacacaggaagcaacacatgtaatgcaacagccaagcacccaacgatcatctaatgcaacagccaaacacccagcgatcatctaatgcaacagccaaacacccagcgatcatctaatgcaacagccaaacacccagcgatcatctaatgcaacagccaaacacccagcgatcatctaatgcaacagccaaacacccagtgatcatctaatgcaacagccaaacacccagtgatcatctaatgcaacagccaaacagacaagtgatcatctaatgcaacagcca

SEQ ID NO: 84 - DNA, 1798 bp, Homo sapien
catgctcgagcggcgcaktgtgatggatcgcccgggcaggtccagtcacagatgtatggccctggaggaggcaagtatttcagcaccactgaagactacgaccatgaaatcacagggctgcgggtgtctgtaggtcttctcctggtgaaaagtgtccaggtgaaacttggagactcctgggacgtgaaactgggagccttaggtgggaatacccaggaagtcaccctgcagccaggcgaatacatcacaaaagtctttgtcgccttccaagctttcctccggggtatggtcatgtacaccagcaaggaccgctatttctattttgggaagcttgatggccagatctcctctgcctaccccagccaagaggggcaggtgctggtgggcatctatggccagtatcaactccttggcatcaagagcattggctttgaatggaattatccactagaggagccgaccactgagccaccagttaatctcacatactcagcaaactcacccgtgggtcgctagggtggggtatggggccatccgagctgaggccatctgggtggtggtggctgatggtactggagtaactgagtcgggacgctgaatctgaatccaccaataaataaagcttctgcagaatcagtgcatccaggattggtccttggatctggggtacaaccaaagccttccctgctccttggagacaaagtccccagtgctgcagcccagtgaactgagatgaggggtagggcaaaggtgactctgccgaggacagaaagagagcagcaccaccccctcagaggtgctgtggatctctgtgccagtcccacaatctttgaagagtcaggcttcaaggccgccactccccactgtccctcaccccaggcccacccagcgggcctctgctggccactcagtcccgggattctctgagtgctcaaggggcctcagggaagccactcactcatccattcactcagcaaacatttgccaaggccgtgtcctcaccaggctcgcctggcactgggggtataaagaagaggccaggtttcagctgagtgcgtatacactgtggtgggggctggtgcagaggcagatagtggcagttcactttgccatctgcatggatggggacacatgcaggtcattgtgcgtaggcacctgcccagaggtgaggtgagagggatgtgcttcagggaagtcttcctagaggaggcaatgtctgagctaagtcttaaaggatgaaggacaattggccaagtggagacaaagggaggaggggattacaggttgagggctcaacatgagcaaagacaggagatgcagatggctggggtaatttgtcacagtagcaacaggaaatcagtacaagccctggacctggcccattcttcatgtccccttcccaagcctccaagcccacatgggcacttgccaagatcagagctccaggggcctccagggacggggttttcagtcctttgggaccatgatccacagagagaaattgatcctacttgagacacaggaagcaacacatgtaatgcaacagccaagcacccaacgatcatctaatgcaacagccaaacacccagcgatcatctaatgcaacagccaaacacccagcgatcatctaatgcaacagccaaacacccagcgatcatctaatgcaacagccaaacacccagcgatcatctaatgcaacagccaaacacccagtgatcatctaatgcaacagccaaacacccagtgatcatctaatgcaacagccaaacagacaagtgatcatctaatgcaacagcca

SEQ ID NO: 85 - DNA, 3099 bp, Homo sapien
ggcgaatgggcctctagatgcatgctcgagcggcgcagtgtgatggatcgccgcggcagggtcacaggcgagagccctgggatgcaccggccagaggccatgctgctgctgctcacgcttgccctcctggggggccccacctgggcagggagtaagtcagtggggtctgccctcaatctcccctgcctccctccaggagagccagggactcacccggcccttgtcccagactaactctggtcacagaaccatcctgtctgcctggaggggcggggtcccctgttccggcagaggtcacccccatatcaccgcatggggattttcttccctttgggtctctcttttcttcagagatgtatggccctggaggaggcaagtatttcagcaccactgaagactacgaccatgaaatcacagggctgcgggtgtctgtaggtcttctcctggtgaaaaggtgagtagggctatggtcatgggcccagcgccatgtcccctcccatcccacagtttcaggaactcagggcagcgggtaagcacccgtggccacttttgccacacatgcctggctactgtcgatgcttcctggctcccgctgatgcttcctggctggagcggacacggtcagaccgtcctccctaccttctcccttcaacccaagctcaactcaaccaaaaatggcccctctgtccccatgcctgataggaaagtcaggggaaagtctgtccgattactgtcaaagaagacaggaggtaagggtcagagtggaccactgactgaatatgagtcgcagaagtgttagaggcagaagtccagggccatttccttaatatcgaagtgtctctgctggaggtctgggatggatttttgccctgcatttagaagttctggggtcctgggagaggggagagaagcccaatagcagaggagacagagtgtgggcggggcgagccggaggggtgcatcctgggagagcaccagggtgagggaggggtgaagatgagccccgtcagggaagcgctggcgagtgtgggaagtcacctgcccctcggcctgtgagctgctctgcttggagtgactaaggctcgggaggtccaggctcggccagaggcagctcatatgtgggccacagtgacggcagctggtgccttctgggtcacggagacctggcgctgcacgcagctctcctcaccaggatctcagtgactcctcccaaaagtcacacccactttgcagacggggaaactgagtccggagaggctgggtaacgagctcaagatcacagggcccaaaagtggtagaatcagggttggtgaccagtgagtctgtgtcagagacccaaagtctgatggtgctggactctctgcatcccgggaaggaggatgggggcgctgaggacccgggatgtgctgggccatcccagatctggacgtccaaagctttgcctctctcccagtgtccaggtgaaacttggagactcctgggacgtgaaactgggagccttaggtgggaatacccaggaagtcaccctgcagccaggcgaatacatcacaaaagtctttgtcgccttccaagctttcctccggggtatggtcatgtacaccagcaaggaccgctatttctattttgggaagcttgatggccagatctcctctgcctaccccagccaagaggggcaggtgctggtgggcatctatggccagtatcaactccttggcatcaagagcattggctttgaatggaattatccactagaggagccgaccactgagccaccagttaatctcacatactcagcaaactcacccgtgggtcgctagggtggggtatggggccatccgagctgaggccatctgggtggtggtggctgatggtactggagtaactgagtcgggacgctgaatctgaatccaccaataaataaagcttctgcagaatcagtgcatccaggattggtccttggatctggggtacaaccaaagccttccctgctccttggagacaaagtccccagtgctgcagcccagtgaactgagatgaggggtagggcaaaggtgactctgccgaggacagaaagagagcagcaccaccccctcagaggtgctgtggatctctgtgccagtcccacaatctttgaagagtcaggcttcaaggccgccactccccactgtccctcaccccaggcccacccagcgggcctctgctggccactcagtcccgggattctctgagtgctcaaggggcctcagggaagccactcactcatccattcactcagcaaacatttgccaaggccgtgtcctcaccaggctcgcctggcactgggggtataaagaagaggccaggtttcagctgagtgcgtatacactgtggtgggggctggtgcagaggcagatagtggcagttcactttgccatctgcatggatggggacacatgcaggtcattgtgcgtaggcacctgcccagaggtgaggtgagagggatgtgcttcagggaagtcttcctagaggaggcaatgtctgagctaagtcttaaaggatgaaggacaattggccaagtggagacaaagggaggaggggattacaggttgagggctcaacatgagcaaagacaggagatgcagatggctggggtaatttgtcacagtagcaacaggaaatcagtacaagccctggacctggcccattcttcatgtccccttcccaagcctccaagcccacatgggcacttgccaagatcagagctccaggggcctccagggacggggttttcagtcctttgggaccatgatccacagagagaaattgatcctacttgagacacaggaagcaacacatgtaatgcaacagccaagcacccaacgatcatctaatgcaacagccaaacacccagcgatcatctaatgcaacagccaaacacccagcgatcatctaatgcaacagccaaacacccagcgatcatctaatgcaacagccaaacacccagcgatcatctaatgcaacagccaaacacccagtgatcatctaatgcaacagccaaacacccagtgatcatctaatgcaacagccaaacagacaagtgatcatctaatgcaacagcca

SEQ ID NO: 86 - DNA, 1547 bp, Homo sapien
cggcttagcgtggtcgcggcgagtcctccggggtatggtcatgtacaccagcaaggaccgctatttctattttgggaagcttgatggccagatctcctctgcctaccccagccaagaggggcaggtgctggtgggcatctatggccagtatcaactccttggcatcaagagcattggctttgaatggaattatccactagaggagccgaccactgagccaccagttaatctcacatactcagcaaactcacccgtgggtcgctagggtggggtatggggccatccgagctgaggccatctgggtggtggtggctgatggtactggagtaactgagtcgggacgctgaatctgaatccaccaataaataaagcttctgcagaatcagtgcatccaggattggtccttggatctggggtacaaccaaagccttccctgctccttggagacaaagtccccagtgctgcagcccagtgaactgagatgaggggtagggcaaaggtgactctgccgaggacagaaagagagcagcaccaccccctcagaggtgctgtggatctctgtgccagtcccacaatctttgaagagtcaggcttcaaggccgccactccccactgtccctcaccccaggcccacccagcgggcctctgctggccactcagtcccgggattctctgagtgctcaaggggcctcagggaagccactcactcatccattcactcagcaaacatttgccaaggccgtgtcctcaccaggctcgcctggcactgggggtataaagaagaggccaggtttcagctgagtgcgtatacactgtggtgggggctggtgcagaggcagatagtggcagttcactttgccatctgcatggatggggacacatgcaggtcattgtgcgtaggcacctgcccagaggtgaggtgagagggatgtgcttcagggaagtcttcctagaggaggcaatgtctgagctaagtcttaaaggatgaaggacaattggccaagtggagacaaagggaggaggggattacaggttgagggctcaacatgagcaaagacaggagatgcagatggctggggtaatttgtcacagtagcaacaggaaatcagtacaagccctggacctggcccattcttcatgtccccttcccaagcctccaagcccacatgggcacttgccaagatcagagctccaggggcctccagggacggggttttcagtcctttgggaccatgatccacagagagaaattgatcctacttgagacacaggaagcaacacatgtaatgcaacagccaagcacccaacgatcatctaatgcaacagccaaacacccagcgatcatctaatgcaacagccaaacacccagcgatcatctaatgcaacagccaaacacccagcgatcatctaatgcaacagccaaacacccagcgatcatctaatgcaacagccaaacacccagtgatcatctaatgcaacagccaaacacccagtgatcatctaatgcaacagccaaacagacaagtgatcatctaatgcaacagcca

SEQ ID NO: 87 - DNA, 2345 bp, Homo sapien
catgctcgagcggcgcagtgtgatggatcgagcggccgcccgggcaggtacgtgctccgggatcttcagcacccgcggccgccatcgccgtcgcttggcttcttctggactcatctgcgccacttgtccgcttcacactccgccgccatcatggtgaagctcgcgaaggcaggtaaaaatcaaggtgaccccaagaaaatggctcctcctccaaaggaggtagaagaagatagtgaagatgaggaaatgtcagaagatgaagaagatgatagcagtggagaagaggtcgtcatacctcagaagaaaggcaagaaggctgctgcaacctcagcaaagaaggtggtcgtttccccaacaaaaaaggttgcagttgccacaccagccaagaaagcagctgtcactccaggcaaaaaggcagcagcaacacctgccaagaagacagttacaccagccaaagcagttaccacacctggcaagaagggagccacaccaggcaaagcattggtagcaactcctggtaagaagggtgctgccatcccagccaagggggcaaagaatggcaagaatgccaagaaggaagacagtgatgaagaggaggatgatgacagtgaggaggatgaggaggatgacgaggacgaggatgaggatgaagatgaaattgaaccagcagcgatgaaagcagcagctgctgcccctgcctcagaggatgaggacgatgaggatgacgaagatgatgaggatgacgatgacgatgaggaagatgactctgaagaagaagctatggagactacaccagccaaaggaaagaaagctgcaaaagttgttcctgtgaaagccaagaacgtggctgaggatgaagatgaagaagaggatgatgaggacgaggatgacgacgacgacgaagatgatgaagatgatgatgatgaagatgatgaggaggaggaagaagaggaggaggaagagcctgtcaaagaagcacctggaaaacgaaagaaggaaatggccaaacagaaagcagctcctgaagccaagaaacagaaagtggaaggcacagaaccgactacggctttcaatctctttgttggaaacctaaactttaacaaatctgctcctgaattaaaaactggtatcagcgatgtttttgctaaaaatgatcttgctgttgtggatgtcagaattggtatgactaggaaatttggttatgtggattttgaatctgctgaagacctggagaaagcgttggaactcactggtttgaaagtctttggcaatgaaattaaactagagaaaccaaaaggaaaagacagtaagaaagagcgagatgcgagaacacttttggctaaaaatctcccttacaaagtcactcaggatgaattgaaagaagtgtttgaagatgctgcggagatcagattagtcagcaaggatgggaaaagtaaagggattgcttatattgaatttaagacagaagctgatgcagagaaaacctttgaagaaaagcagggaacagagatcgatgggcgatctatttccctgtactatactggagagaaaggtcaaaatcaagactatagaggtggaaagaatagcacttggagtggtgaatcaaaaactctggttttaagcaacctctcctacagtgcaacagaagaaactcttcaggaagtatttgagaaagcaacttttatcaaagtaccccagaaccaaaatggcaaatctaaagggtatgcatttatagagtttgcttcattcgaagacgctaaagaagctttaaattcctgtaataaaagggaaattgagggcagagcaatcaggctggaggcgaggaggcttccgaggaggcagaggaggaggaggtgaccacaagccacaaggaaagaagacgaagtttgaatagcttctgtccctctgctttcccttttccatttgaaagaaaggactctggggtttttactgttacctgatcaatgacagagccttctgaggacattccaagacagtatacagtcctgtggtctccttggaaatccgtctagttaacatttcaagggcaataccgtgttggttttgactggatattcatataaactttttaaagagttgagtgatagagctaacccttatctgtaagttttgaatttatattgtttcatcccatgtacaaaaccattttttcctacaaatagtttgggttttgttgttgtttcttttttttgttttgtttttgttttttttttttttgcgttcgtggggttgtaaaagaaaagaaagcagaatgttttatcatggtttttgcttcagcggctttaggacaaattaaaagtcaactctggtgccaaaaaaaaaaa

SEQ ID NO: 88 - DNA, 1716 bp, Homo sapien
catgctcgagcggcgcagtgtgatggatcgagcggccgcccgggcaggtacgtgctccgggatcttcagcacccgcggccgccatcgccgtcgcttggcttcttctggactcatctgcgccacttgtccgcttcacactccgccgccatcatggtgaagctcgcgaaggcaggtaaaaatcaaggtgaccccaagaaaatggctcctcctccaaaggaggtagaagaagatagtgaagatgaggaaatgtcagaagatgaagaagatgatagcagtggagaagaggtcgtcatacctcagaagaaaggcaagaaggctgctgcaacctcagcaaagaaggtggtcgtttccccaacaaaaaaggttgcagttgccacaccagccaagaaagcagctgtcactccaggcaaaaaggcagcagcaacacctgccaagaagacagttacaccagccaaagcagttaccacacctggcaagaagggagccacaccaggcaaagcattggtagcaactcctggtaagaagggtgctgccatcccagccaagggggcaaagaatggcaagaatgccaagaaggaagacagtgatgaagaggaggatgatgacagtgaggaggatgaggaggatgacgaggacgaggatgaggatgaagatgaaattgaaccagcagcgatgaaagcagcagctgctgcccctgcctcagaggatgaggacgatgaggatgacgaagatgatgaggatgacgatgacgatgaggaagatgactctgaagaagaagctatggagactacaccagccaaaggaaagaaagctgcaaaagttgttcctgtgaaagccaagaacgtggctgaggatgaagatgaagaagaggatgatgaggacgaggatgacgacgacgacgaagatgatgaagatgatgatgatgaagatgatgaggaggaggaagaagaggaggaggaagagcctgtcaaagaagcacctggaaaacgaaagaaggaaatggccaaacagaaagcagctcctgaagccaagaaacagaaagtggaaggcacagaaccgactacggctttcaatctctttgttggaaacctaaactttaacaaatctgctcctgaattaaaaactggtatcagcgatgtttttgctaaaaatgatcttgctgttgtggatgtcagaattggtatgactaggaaatttggttatgtggattttgaatctgctgaagacctggagaaagcgttggaactcactggtttgaaagtctttggcaatgaaattaaactagagaaaccaaaaggaaaagacagtaagaaagagcgagatgcgagaacacttttggctaaaaatctcccttacaaagtcactcaggatgaattgaaagaagtgtttgaagatgctgcggagatcagattagtcagcaaggatgggaaaagtaaagggattgcttatattgaatttaagacagaagctgatgcagagaaaacctttgaagaaaagcagggaacagagatcgatgggcgatctatttccctgtactatactggagagaaaggtcaaaatcaagactatagaggtggaaagaatagcacttggagtggtgaatcaaaaactctggttttaagcaacctctcctacagtgcaacagaagaaactcttcaggaagtatttgagaaagcaacttttatcaaagtacctcggccgcgaccacgctaagcc

SEQ ID NO: 89 - DNA, 2068 bp, Homo sapien
gcagattgcagggcccgggctgacgggaagtgggtgggagctgcctgcacacgcggtgccgcggggcgggagtagaggcggagggaggggacacgggctcattgcggtgtgcgccctgcactctgtccctcactcgccgccgacgacctgtctcgccgagcgcacgccttgccgccgccccgcagaaatgcttcggttacccacagtctttcgccagatgagaccggtgtccagggtactggctcctcatctcactcgggcttatgccaaagatgtaaaatttggtgcagatgcccgagccttaatgcttcaaggtgtagaccttttagccgatgctgtggccgttacaatggggccaaagggaagaacagtgattattgagcagagttggggaagtcccaaagtaacaaaagatggtgtgactgttgcaaagtcaattgacttaaaagataaatacaagaacattggagctaaacttgttcaagatgttgccaataacacaaatgaagaagctggggatggcactaccactgctactgtactggcacgctctatagccaaggaaggcttcgagaagattagcaaaggtgctaatccagtggaaatcaggagaggtgtgatgttagctgttgatgctgtaattgctgaacttaaaaagcagtctaaacctgtgaccacccctgaagaaattgcacaggttgctacgatttctgcaaacggagacaaagaaattggcaatatcatctctgatgcaatgaaaaaagttggaagaaagggtgtcatcacagtaaaggatggaaaaacactgaatgatgaattagaaattattgaaggcatgaagtttgatcgaggctatatttctccatactttattaatacatcaaaaggtcagaaatgtgaattccaggatgcctatgttctgttgagtgaaaagaaaatttctagtatccagtccattgtacctgctcttgaaattgccaatgctcaccgtaagcctttggtcataatcgctgaagatgttgatggagaagctctaagtacactcgtcttgaataggctaaaggttggtcttcaggttgtggcagtcaaggctccagggtttggtgacaatagaaagaaccagcttaaagatatggctattgctactggtggtgcagtgtttggagaagagggattgaccctgaatcttgaagacgttcagcctcatgacttaggaaaagttggagaggtcattgtgaccaaagacgatgccatgctcttaaaaggaaaaggtgacaaggctcaaattgaaaaacgtattcaagaaatcattgagcagttagatgtcacaactagtgaatatgaaaaggaaaaactgaatgaacggcttgcaaaactttcagatggagtggctgtgctgaaggttggtgggacaagtgatgttgaagtgaatgaaaagaaagacagagttacagatgcccttaatgctacaagagctgctgttgaagaaggcattgttttgggagggggttgtgccctccttcgatgcattccagccttggactcattgactccagctaatgaagatcaaaaaattggtatagaaattattaaaagaacactcaaaattccagcaatgaccattgctaagaatgcaggtgttgaaggatctttgatagttgagaaaattatgcaaagttcctcagaagttggttatgatgctatggctggagattttgtgaatatggtggaaaaaggaatcattgacccaacaaaggtaaatggttgaacactttctaaaaattcttttgttgttcattttgttaatgtatcctcacatcccaaatctttgattttgtcaccagaaaaatagtctaatagcagtagcaacagcaatagctcttgtgcccatcaacaattctcatgtacatttccagcacctagatatttaatactccactaaaaggaagcaggatcccttgagtagcagttgagtccatgcctggaggcaggaaaaaatcaggatggatctggaacaccctgttcctgcctggcagtaagaatattttccaagatacgcagaacaggg

SEQ ID NO: 90 - DNA, 366 bp, Homo sapien
gccagtgtgatggattcgcggcgaggtgtctactgttcacgaaatcctgtgcaagctcagcttggagggtgatcactctacacccccaagtgcatatgggtctgtcaaagcctatactaactttgatgctgagcgggatgctttgaacattgaaacagccatcaagaccaaagaggtgtggatgaggtcaccattgtcaacattttgaccaaccgcagcaatgcacagagacaggatattgccttcgcctaccagagaaggaccaaaaaggaacttgcatcagcactgaagtcagccttatctggccacctggagacggtgattttgggcctattgaagacacctgctcagtatgacgcttctgag

SEQ ID NO: 91 - DNA, 1346 bp, Homo sapien
catgctcgagcggcgcagtgtgatggatcgtggtcgcggccgagggacgctctcagctctcggcgcacggcccagcttccttcaaaatgtctactgttcacgaaatcctgtgcaagctcagcttggagggtgatcactctacacccccaagtgcatatgggtctgtcaaagcctatactaactttgatgctgagcgggatgctttgaacattgaaacagccatcaagaccaaaggtgtggatgaggtcaccattgtcaacattttgaccaaccgcagcaatgcacagagacaggatattgccttcgcctaccagagaaggaccaaaaaggaacttgcatcagcactgaagtcagccttatctggccacctggagacggtgattttgggcctattgaagacacctgctcagtatgacgcttctgagctctgctccagaaccaaccaggagctgcaggaaattaacagagtctacaaggaaatgtacaagactgatctggagaaggacattatttcggacacatctggtgacttccgcaagctgatggttgccctggcaaagggtagaagagcagaggatggctctgtcattgattatgaactgattgaccaagatgctcgggatctctatgacgctggagtgaagaggaaaggaactgatgttcccaagtggatcagcatcatgaccgagcggagcgtgccccacctccagaaagtatttgataggtacaagagttacagcccttatgacatgttggaaagcatcaggaaagaggttaaaggagacctggaaaatgctttcctgaacctggttcagtgcattcagaacaagcccctgtattttgctgatcggctgtatgactccatgaagggcaaggggacgcgagataaggtcctgatcagaatcatggtctcccgcagtgaagtggacatgttgaaaattaggtctgaattcaagagaaagtacggcaagtccctgtactattatatccagcaagacactaagggcgactaccagaaagcgctgctgtacctgtgtggtggagatgactgaagcccgacacggcctgagcgtccagaaatggtgctcaccatgcttccagctaacaggtctagaaaaccagcttgcgaataacagtccccgtggccatccctgtgagggtgacgttagcattacccccaacctcattttagttgcctaagcattgcctggccttcctgtctagtctctcctgtaagccaaagaaatgaacattccaaggagttggaagtgaagtctatgatgtgaaacactttgcctcctgtgtactgtgtcataaacagatgaataaactgaatttgtacttta

SEQ ID NO: 92 - DNA, 756 bp, Homo sapien
ccgaggcccctccttgctcgacgccgatatctctgccgggtgactagctgcttcctttctctctcgcgcgcggtgtggtggcagcaggcgcagcaggcgcacccagcctcgaaatgcagaacgacgccggcgagttcgtggacctgtacgtgccgcggaaatgctccgctagcaatcgcatcatcggtgccaaggaccacgcatccatccagatgaacgtggccgaggttgacaaggtcacaggcaggtttaatggccagtttaaaacttatgctatctgcggggccattcgtaggatgggtgagtcagatgattccattctccgattggccaaggccgatggcatcgtctcaaagtaaggttgggggctcacatttgggcagagtgagtggactaggactgctccagaggcgtggtcttaacgttgtccttttcccctggttctaggaacttttgactggagagaatcacagatgtggaatatttgtcataaataaataatgaaaacctaaaaaaaaaaaaaaaaaaactcgagactagcttctctcaaataataaccatacacaacactaaggggcgaacctgatctcttatacaagtatccttagtcatttcttttgtgcgcacaattaacctcctcggactccggctcactcatttacaccaaccacccaatatctttaaacctagcatgggcatcctcttatgaggggggcgggataaaggagtcggcctaagataatatggcctagccat

SEQ ID NO: 93 - DNA, 1420 bp, Homo sapien
ccgaggcccctccttgctcgacgccgatatctctgccgggtgactagctgcttcctttctctctcgcgcgcggtgtggtggcagcaggcgcagcaggcgcacccagcctcgaaatgcagaacgacgccggcgagttcgtggacctgtacgtgccgcggaaatgctccgctagcaatcgcatcatcggtgccaaggaccacgcatccatccagatgaacgtggccgaggttgacaaggtcacaggcaggtttaatggccagtttaaaacttatgctatctgcggggccattcgtaggatggtgagtgtttccctgggctttgctcatcacttcgggacatcgtggactttaccgtgcgcattggagtgtgtgatggtgcctgagtagatctgctggcagagtagtttgagccagctggactgggctggccgcctgccgcttcttgagggtggaagaggggtgctctgagaagacactcaggcagcagactctgcctctcactaggaggtgcccccccgaccccgctccaccatagtcaggctgcaggctgccccgggagaggtggctccccttctgcgcctgtctccattcgctcagcgggggagagacgtgggctggtggcacagctgaccttctgccatctcaggcagccggagtggaaatattcttagtgtgcttttttttttttcttaagggtgagtcagatgattccattctccgattggccaaggccgatggcatcgtctcaaagtaaggttgggggctcacatttgggcagagtgagtggactaggactgctccagaggcgtggtcttaacgttgtccttttcccctggttctaggaacttttgactggagagaatcacagatgtggaatatttgtcataaataaataatgaaaacctaaaaaaaaaaaaaaaaaaaaaaaaaaaaaaaaaaaaaaaaaaaaaaaaaaaaaaaaaaaaaaaaaaaaaagaggggggggcgcgcccaaaaaatccccccggggggcgcgcctttgcgcccccgcttttgtgtgaaaggggggcccccatgaggggctttttaaagggccgcgcagcggggcgcgcgttataaaaagcaccagcagcgagtgggggaacacagccgagccacgcgggggagatctcttggggagaaggagcccccatatcggcggggggggggagagcaaaattagggggggaaacaccctacacctaaacgaagatatattaagaaactcttgggaggggaagtaatatataaacttttcagagagggggtatataggtgggtgaaaaaccagagacgcgagatcgtatggatgtggggtggtaaaagaatattgtgggtctagcgagtgtatgtaatttcgacgaaactttattatagcgaggggcgttttagatgataaggtg

SEQ ID NO: 94 - DNA, 1536 bp, Homo sapien
ggcacgaggcatcgcgcgcggtgtggtggcagcaggcgcagcaggcgcacccagcctcgaaatgcagaacgacgccggcgagttcgtggacctgtacgtgccgcggaaatgctccgctagcaatcgcatcatcggtgccaaggaccacgcatccatccagatgaacgtggccgaggtgagctgggagcccgggaggcgggaaggttgtgatatatgtgcgggaaaggcaggctgtcccattgtggaggagcccctggggtgaaggtacaggcagaggctggctttgaggattggtgtttcccaaacctgggggagtggtttgtgacccttcttctctttctaggttgacaaggtcacaggcaggtttaatggccagtttaaaacttatgctatctgcggggccattcgtaggatggtgagtgtttccctgggctttgctcatcacttcgggacatcgtggactttaccgtgcgcattggagtgtgtgatggtgcctgagtagatctgctggcagagtagtttgagccagctggactgggctggccgcctgccgcttcttgagggtggaagaggggtgctctgagaagacactcaggcagcagactctgcctctcactaggaggtgcccccccgaccccgctccaccatagtcaggctgcaggctgccccgggagaggtggctccccttctgcgcctgtctccattcgctcagcgggggagagacgtgggctggtggcacagctgaccttctgccatctcaggcagccggagtggaaatattcttagtgtgcttttttttttttcttaagggtgagtcagatgattccattctccgattggccaaggccgatggcatcgtctcaaagtaaggttgggggctcacatttgggcagagtgagtggactaggactgctccagaggcgtggtcttaacgttgtccttttcccctggttctaggaacttttgactggagagaatcacagatgtggaatatttgtcataaataaataatgaaaacctaaaaaaaaaaaaaaaaaaaaaaaaaaaaaaaaaaaaaaaaaaaaaaaaaaaaaaaaaaaaaaaaaaaaaagaggggggggcgcgcccaaaaaatccccccggggggcgcgcctttgcgcccccgcttttgtgtgaaaggggggcccccatgaggggctttttaaagggccgcgcagcggggcgcgcgttataaaaagcaccagcagcgagtgggggaacacagccgagccacgcgggggagatctcttggggagaaggagcccccatatcggcggggggggggagagcaaaattagggggggaaacaccctacacctaaacgaagatatattaagaaactcttgggaggggaagtaatatataaacttttcagagagggggtatataggtgggtgaaaaaccagagacgcgagatcgtatggatgtggggtggtaaaagaatattgtgggtctagcgagtgtatgtaatttcgacgaaactttattatagcgaggggcgttttagatgataaggtg

SEQ ID NO: 95 - DNA, 930 bp, Homo sapien
agatcatgccgagcggcgccagtgtgatggatgcgtggtcgcggccgaggtacgtgccgcggaaatgctccgctagcaatcgcatcatcggtgccaaggaccacgcatccatccagatgaacgtggccgaggttgacaaggtcacaggcaggtttaatggccagtttaaaacttatgctatctgcggggccattcgtaggatgggtgagtcagatgattccattctccgattggccaaggccgatggcatcgtctcaaagtaaggttgggggctcacatttgggcagagtgagtggactaggactgctccagaggcgtggtcttaacgttgtccttttcccctggttctaggaacttttgactggagagaatcacagatgtggaatatttgtcataaataaataatgaaaacctaaaaaaaaaaaaaaaaaaaaaaaaaaaaaaaaaaaaaaaaaaaaaaaaaaaaaaaaaaaaaaaaaaaaaagaggggggggcgcgcccaaaaaatccccccggggggcgcgcctttgcgcccccgcttttgtgtgaaaggggggcccccatgaggggctttttaaagggccgcgcagcggggcgcgcgttataaaaagcaccagcagcgagtgggggaacacagccgagccacgcgggggagatctcttggggagaaggagcccccatatcggcggggggggggagagcaaaattagggggggaaacaccctacacctaaacgaagatatattaagaaactcttgggaggggaagtaatatataaacttttcagagagggggtatataggtgggtgaaaaaccagagacgcgagatcgtatggatgtggggtggtaaaagaatattgtgggtctagcgagtgtatgtaatttcgacgaaactttattatagcgaggggcgttttagatgataaggtg

SEQ ID NO: 96 - protein, 185 aa, Homo sapien
  MISC_FEATURE (35)..(35): X=any amino acid
  MISC_FEATURE (70)..(70): X=any amino acid
  MISC_FEATURE (81)..(81): X=any amino acid
  MISC_FEATURE (93)..(93): X=any amino acid
QKSIHACNVGGRLLCQDRPPTLQKSIHACAARIAXSSGHRPGTFSRVTALNDVETRDSTWPHARCEGPAXSRDVWTPAGCXQEAVELVQYAYXSEKVRGERRRTRKEANVKDEVKDRQIDRGETAKRTLEQKRKRRKTRQPDAKDGDSYDPYDFSDTEEEMPQVHTPKTADSQETKESQKVELSE

SEQ ID NO: 97 - protein, 109 aa, Homo sapien
  MISC_FEATURE (11)..(11): X=any amino acid
  MISC_FEATURE (39)..(39): X=any amino acid
  MISC_FEATURE (41)..(42): X=any amino acid
  MISC_FEATURE (44)..(44): X=any amino acid
  MISC_FEATURE (55)..(57): X=any amino acid
  MISC_FEATURE (77)..(77): X=any amino acid
AETCGPLQDAXRKLWSWSSMLTFREGSWRTEKKRKKRSXGXXQXQKMKRRKAKRXXXRRGREGRLASQMPKMGIHTXPMTSVTQRRKCLKYTLQRRQTHRRPRNPRKWS

SEQ ID NO: 98 - protein, 106 aa, Homo sapien
PGLIPLEDKEDYGPNKECPLCLCPRLFESLSRDLKKDYGVYLEDSGTHCLEVSVQIFIDDKGILRQITLNDLPVGRSVDETLRLVQAFQYTDKHGEVCPAGWKPGK

SEQ ID NO: 99 - protein, 75 aa, Homo sapien
IPKSRSQKDYGVYLEDSGHTLRGLFIIDDKGILRQITLNDLPVGRSVDETLRLVQAFQYTDKHGEVCPAGWKPGK

SEQ ID NO: 100 - protein, 224 aa, Homo sapien
MSYLKRLCGTFLGGPKPPQRVMFTEDLKLPASFDAREQWPQCPTIKEIRDQGSCGSCWAFGAVEAISDRICIQHQCARRAWRCRRRTCSHAVAACVGTAVMVAILLKLGTSGQEKAWFLVAIYESHVGCRPYFHTLPVSTTSKGSRPPCTGEGDTPKCSKSCEPGYRPSYKQDKRYGYNSYSVSNSEKDIMAEISKNGPWRELSLCIGLPGLEVRECTNTSPER

SEQ ID NO: 101 - protein, 181 aa, Homo sapien
  MISC_FEATURE (16)..(16): X=any amino acid
  MISC_FEATURE (19)..(20): X=any amino acid
  MISC_FEATURE (22)..(29): X=any amino acid
  MISC_FEATURE (31)..(32): X=any amino acid
  MISC_FEATURE (34)..(34): X=any amino acid
  MISC_FEATURE (37)..(37): X=any amino acid
  MISC_FEATURE (153)..(153): X=any amino acid
  MISC_FEATURE (172)..(172): X=any amino acid
PLRQRQPLRCAQAGLXALXXSXXXXXXXXSXXSXLSXSLCCLLVLANARSRPSFHPLSDELVNYVNKRNTTWQAGHNFYNVDMSYLKRLCGTFLGGPKPPQRVMFTEDLKLPASFDAREQWPQCPTIKEIRDQGSCGSCWAFGAVEAISDRIXIHTNAHVERGGVGGGPAHXLWQHVWGRL

SEQ ID NO: 102 - protein, 227 aa, Homo sapien
  MISC_FEATURE (45)..(45): X=any amino acid
  MISC_FEATURE (78)..(78): X=any amino acid
  MISC_FEATURE (85)..(85): X=any amino acid
TSLHEDDWRSRPSRGPALTPIRDEEWGGHSPRSPRGWDQEPAREXAGGGWRARRPRARSDRRHWTTSPRRAPHESGSXSPTNNGXRSRAYMPTVDPHVRDDLLWTKYNSRDIPTATTGDPLLLYNIQALRDAALLSYPMVPTHHAYLGTLWDKRLPGSGDLPYDGRLLEEAVRKKGGRRRRRIPHKEEEEEAYYPPAPPPYSETDSQASRERRLKKNLALSRESLVV

SEQ ID NO: 103 - protein, 222 aa, Homo sapien
  MISC_FEATURE (10)..(10): X=any amino acid
  MISC_FEATURE (45)..(45): X=any amino acid
  MISC_FEATURE (59)..(59): X=any amino acid
  MISC_FEATURE (79)..(79): X=any amino acid
  MISC_FEATURE (86)..(86): X=any amino acid
SPPSTRTIGXLGLPGALPSPRSGMRSGVATPPGVPGDGTRSPPGXRQAGAGGPGGPGPXPIDATGRPHPAEHRTSQGAXLPRIMVXEAGHYMPPQSPSRDDLYDQDNSRDIPTLPQATPIYDNIQAPRERPPAYPRSHHHRTRDPRDNGSRSGDLPYDGRLLEEAVRKKGVGGEEDTPQGGGGRGLLPARAAPVLGDRLAGVPRAQAQEELGPESGKFSRLI

SEQ ID NO: 104 - protein, 74 aa, Homo sapien
MRLGVFVRRLLCVPGRGDDVVLVVVCLWEPHVGTAVGKYYRRAKCGGPSSLDGICMMSSEGRDVCGGLRFLSCI

SEQ ID NO: 105 - protein, 85 aa, Homo sapien
GVCSGVLLAWSDASWSFREAPLCVPGRGDDVVLVVVCLWEPHVGTAVGKYYRRAKCGGPSSLDGICMMSSEGRDVCGGLRFLSCI

SEQ ID NO: 106 - protein, 85 aa, Homo sapien; identical to SEQ ID NO: 105

SEQ ID NO: 107 - protein, 66 aa, Homo sapien
TGRLYSPPECRGKSLTSKGPTKQFRNLPPVNVPTTEVSPTFSENHHKNHHTKCSSYTEYTCQGSSR

SEQ ID NO: 108 - protein, 66 aa, Homo sapien
  MISC_FEATURE (54)..(54): X=any amino acid
TGRLYSPPECRGKSLTSKGPTKQFRNLPPVNVPTTEVSPTSQKTTTKTTTPNAXATRSTPARDPLE

SEQ ID NO: 109 - protein, 126 aa, Homo sapien
MWHLSPFALGICDPSIVLRPLCPHFPVHVGDDGSPFPFAQLPPGARGPSPQGVWIYSFIRPGPPMFACLCTSTPNVSALPPEALCRASLFWRGRGCGVTCTLGLVDTVNSSQVDFSGGEKKGHLRL

SEQ ID NO: 110 - protein, 117 aa, Homo sapien
LGPVFSRAPFLTLVWITCVGMWHLSPFALGICDPSIVLRPLCPHFPVHVGDDGSPFPFAQLPPGARGPSPQGVWIYSFIRPGPPMFACLCTSTPNVSALPPEALCRASLFWEDGGAV

SEQ ID NO: 111 - protein, 170 aa, Homo sapien
MYFKDYIQERSDPVEQGKPVIPAAVLGRLHRKWTYSAVAVSPGAAITQILPVIHQLDWRLMEFKLADPDEVAASGERGLAHDELREAEPGLTLLLRLEHHAQDVGESATCSRLNVRTSETCLGFQRPEGTVTRITWAVTTPYTGRYLTFRPGTHPLNPAPQGFVVPVGCP

SEQ ID NO: 112 - protein, 225 aa, Homo sapien
  MISC_FEATURE (41)..(43): X=any amino acid
  MISC_FEATURE (46)..(48): X=any amino acid
  MISC_FEATURE (50)..(50): X=any amino acid
  MISC_FEATURE (57)..(57): X=any amino acid
  MISC_FEATURE (68)..(68): X=any amino acid
  MISC_FEATURE (95)..(95): X=any amino acid
  MISC_FEATURE (101)..(101): X=any amino acid
  MISC_FEATURE (110)..(110): X=any amino acid
  MISC_FEATURE (113)..(113): X=any amino acid
KDFDSPENGADSFQSSDSLLQSWNSQSSLLDVQRVPSFESXXXDCXXXLXLNKPTCXSRITSKRGVTXWSKANQLYLQLCWPASQEVDLFSCGSXSWSCYXTNPASHSSXGLXTDGSLSSPTPMRWPASGERGLAHDELREAEPGLTLLLRLEHHAQDVGESATCSRLNVRTSETCLGFQRPEGTVTRITWAVTTPYTGRYLTFRPGTHPLNPAPQGFVVPVGCP

SEQ ID NO: 113 - protein, 175 aa, Homo sapien
GGEEGRASWGQCRLFGPGKLRWAGLPPVWLCQGHPGVLHLGPGGWEGREAFGLLNHLEVSLLQTSAGSGSPGVMGSGWLNLEIVWSLFEGPAWLLLQRNCRHLSFPSLPHPTAEKGWRGESSSAFHSVYVSGDSRGAGLKIAGGRPSPGCCSVGAWPSSSRPTCFLWCGQSQLPS

SEQ ID NO: 114 - protein, 270 aa, Homo sapien
MDDQRDLISNNEQLPMLGRRPGAPESKCSRGALYTGFSILVTLLLAGQATTAYFLYQQQGRLDKLTVTSQNLQLENLRMKLPKPPKPVSKMRMATPLLMQALPMGALPQGPMQNATKYGNMTEDHVMHLLQNADPLKVYPPLKGSFPENLRHLKNTMETIDWKVFESWMHHWLLFEMSRHSLEQKPTDAPPKVLTKCQEEVSHIPGCPPGFIQAQVRRERQLSATPVLWGASATAGVSSPTARRSPTPEAAGTITAVSHWNWRTRLLGWV

SEQ ID NO: 115 - protein, 225 aa, Homo sapien
GRTGDAVCCPPALLDLRGPPGPPSAGFDFSFLPQPPQEKAHDGGRYYRADDANVVRDRDLEVDTTLKSLSQQIENIRSPEGSRKNPARTCCDLKMCQSDWKSGEYWIDPNQGCSLDAIKVFMRTMETGETLRVPHSASVWRQKNWYISKNPKDKRHVWFGESMTDGFQFEYGGQGSDPADVAIQLTFLRLMSSEAFQNITYHCKNSVAYMDHQTGNLKKALLLQG

SEQ ID NO: 116 - protein, 121 aa, Homo sapien
  MISC_FEATURE (89)..(89): X=any amino acid
WIDPKLRLQAGCHPIRCMRSMETGETLRVPHSASVWRQKNWYISKNPKDKRHVWFGESMTDGFQFEYGGQGSDPADVAIQLTFLRLMSXEAFQNITYHCKNSVAYMDHQTGNLKKALLLQG

SEQ ID NO: 117 - protein, 66 aa, Homo sapien
MALNREFSFIVITTVTLTLCLSGLFAILRSVGFPIFRDIIELTIPYYGFIFFPFKHSKETIYYFFP

SEQ ID NO: 118 - protein, 81 aa, Homo sapien
  MISC_FEATURE (75)..(75): X=any amino acid
QRVLFHCDHYRDTYFVPIRTFCNIALCRLSNLQGYHRARPFPTMDLFFFLSNTVRKQSITFFLKRRIYSTVIQLXNIFRMM

SEQ ID NO: 119 - protein, 253 aa, Homo sapien
MVDYYEVLGVQRHALYPRDSYKRHIGKLALKWHPDKNPENKEEASSRKFKQVAEAYEVLSDAKKRDIYDKYGNRRIKVVEDGGGSHFDSPFEFGFTFRNPDDVFREFFRWKGPILHLTSLKTLLRTSLGIEGVPEEAEAEGRGRFNLRSVDFRLLEAGWSSMDAGFTSLGSLGHGVLTLFSSTSFGGSGMGNYKSISTSTKLVNGRPITTKRIVDNSQDRVQVEDDGQLKFLTIGYEQLLCLDNKMIQRTRLA

SEQ ID NO: 120 - protein, 203 aa, Homo sapien
  MISC_FEATURE (32)..(32): X=any amino acid
  MISC_FEATURE (104)..(104): X=any amino acid
RRSSSRKFKQVAEAYEVLSDAKKRDIYDKYGXRRIKWWRTEVEVILTVHLNLASHSVTQMMSSGNFLGGRDPFSFDFFEDPFEDFFGNRRGPRGSRSRGTGSFXSAFSGFPSFVSGWSSMDAGFTSLGSLGHGVLTLFSSTSFGGSGMGNYKSISTSTKLVNGRPITTKRIVDNSQDRVQVEDDGQLKFLTIGYEQLLCLDNK

SEQ ID NO: 121 - protein, 128 aa, Homo sapien
MAVQISKKRKFVADGIFKAELNEFLTRELAEDGYSGVEVRVTPTRTEIIILATRTQNVLGEKGRRIRELTAVVQKRFGFPEGSVELYAEKVATRGLCAISPGRVSAVPTPRRARCAASFLSLSRTPMG

SEQ ID NO: 122 - protein, 143 aa, Homo sapien
  MISC_FEATURE (2)..(2): X=any amino acid
  MISC_FEATURE (115)..(115): X=any amino acid
  MISC_FEATURE (119)..(119): X=any amino acid
  MISC_FEATURE (121)..(121): X=any amino acid
  MISC_FEATURE (123)..(123): X=any amino acid
  MISC_FEATURE (125)..(126): X=any amino acid
KXATGAFLSAERGGKMAVQISKKRKFVADGIFKAELNEFLTRELAEDGYSGVEVRVTPTRTEIIILATRTQNVLGEKGRRIRELTAVVQKRFGFPEGSVELYAEKVATRGLCAIXPAEXLXYXLXXGSLRRVFPIAVPHAHGA

SEQ ID NO: 123 - protein, 75 aa, Homo sapien
  MISC_FEATURE (2)..(2): X=any amino acid
  MISC_FEATURE (21)..(24): X=any amino acid
  MISC_FEATURE (26)..(26): X=any amino acid
  MISC_FEATURE (31)..(31): X=any amino acid
  MISC_FEATURE (36)..(36): X=any amino acid
  MISC_FEATURE (45)..(45): X=any amino acid
HXLQKHLAGLGLTEAIDKNKXXXXRXSGKKXFYLAXFHATAFELXTDGNPFDQDIYGREGGAAPSCSTPTTPSSS

SEQ ID NO: 124 - protein, 110 aa, Homo sapien
CGTPKAAPCYSLGAWSGLRVTRCETSYRASGCTQDGRRHPKAPETHGCYWGWGGGEVPALDTPWGGGGKTDRGSRVPERTFPARIHSTWTWAPDTMMLSPETPHPVGPGP

SEQ ID NO: 125 - protein, 196 aa, Homo sapien
MSPRFPARPWVVKLVASLHEDLHEVSVRSRPSPVPTPGWLGEGVALVDGPPVGDPLSRVPEPCRVRTKTVKKAARVIIEKYYTRLGNDFHTNKRVCEEIAIIPSKKLRNKIAGYVTHLMKRIQRGPVRGISIKLQEEERERRDNYVPEVSALDQEIIEVDPDTKEMLKLLDFGSLSNLQVTQPTVGMNFKTPRGPV

SEQ ID NO: 126 - protein, 207 aa, Homo sapien
MPEHCGLGHRRCACQQHGASPGRMTFEGDTDVWAMPGSWEQRPRAGPGVRAARAGGFWEPKARLRLQTLGPNMGRVRTKTVKKAARVIIEKYYTRLGNDFHTNKRVCEEIAIIPSKKLRNKIAGYVTHLMKRIQRGPVRGISIKLQEEERERRDNYVPEVSALDQEIIEVDPDTKEMLKLLDFGSLSNLQVTQPTVGMNFKTPRGPV

SEQ ID NO: 127 - protein, 180 aa, Homo sapien
GGHRCLGNARVLGTEAPSRTRSAGSAGRGLLGAKGEAEVANSGANMGRVRTKTVKKAARVIIEKYYTRLGNDFHTNKRVCEEIAIIPSKKLRNKIAGYVTHLMKRIQRGPVRGISIKLQEEERERRDNYVPEVSALDQEIIEVDPDTKEMLKLLDFGSLSNLQVTQPTVGMNFKTPRGPV

SEQ ID NO: 128 - protein, 150 aa, Homo sapien
MGRVRTKTVKKAARVIIEKYYTRLGNDFHTNKRVCEEIAIIPSKKLRNKIAGYVTHLMKRIQRGPVRGISIKLQEEERERRDNYVPEVSALDQEIIEVDPDTKEMLKLLDFGSLSNLQVIHPNCRLSDLKVGQTAQPTVGMNFKTPRGPV

SEQ ID NO: 129 - protein, 298 aa, Homo sapien
MRLAALAVSACILFREALLRPWTGPPERMPVRAARGEGPVAMGRVIRGQRKGAGSVFRAHVKHRKGAARLRAVDFAERHGYIKGIVKDIIHDPGRGAPLAKVVFRDPYRFKKRTELFIAAEGIHTGQFVYCGKKAQLNIGNVLPVGTMPEGTIVCCLEEKPGDRGKLARASGNYATVISHNPETKKTRVKLPSGSKKVISSANRAVVGVVAGGGRIDKPILKAGRAYHKYKAKRNCWPRVRGVAMNPVEHPFGGGNHQHIGKPSTIRRDAPAGRKVGLIAARRTGRLRGTKTVQEKEN

SEQ ID NO: 130 - protein, 271 aa, Homo sapien
  MISC_FEATURE (1)..(2): X=any amino acid
XXAGAGARGEGPVAMGRVIRGQRKGAGSVFRAHVKHRKGAARLRAVDFAERHGYIKGIVKDIIHDPGRGAPLAKVVFRDPYRFKKRTELFIAAEGIHTGQFVYCGKKAQLNIGNVLPVGTMPEGTIVCCLEEKPGDRGKLARASGNYATVISHNPETKKTRVKLPSGSKKVISSANRAVVGVVAGGGRIDKPILKAGRAYHKYKAKRNCWPRVRGVAMNPVEHPFGGGNHQHIGKPSTIRRDAPAGRKVGLIAARRTGRLRGTKTVQEKEN

SEQ ID NO: 131 - protein, 550 aa, Homo sapien
MMKAAGKQQRVQQQHSSAQHQQHACTANSPKHRKHVGSSMQAGMHSRSQASSTAQQQLKHSIQQQQIPLHPGTATQTSTKPIWTRNPDDITQEEYGEFYKSLTNDWEDHLAVKHFSVEGQLEFRALLFIPRRAPFDLCENKKKKNNIKLYVRRVFIMDSCDELIPEYLNFIRGVVDSEDLPLNISREMLQQSKILKVHSQQTLLRSALSSSLELAEDKAELQDNSYEGTSHKNLNAWNPRRHPLTGAACLELLRYHTSQSGDEMTSLSEYVSRMKETQKSIYYITGESKEQVANSAFVERVRKRGFEVVYMTEPIDEYCVQQLKEFDGKSLVSVTKEGLELPEDEEEKKKMEESKAKFENLCKLMKEILDKKVEKVTISNRLVSSPCCIVTSTYGWTANMERIMKAQALRDNSTMGYMMAKKHLEINPDHPIVETLRQKAEADENDKAVKDLVVLLFETALVSSGFSLEDPQTQSNRIYRMIKLGLGIDEDEVAAEEPNAAVPDEIPPLEGDEDASRMRGSRVRLGVVLGNTCAFGFCVPHGAPTAPRVP

SEQ ID NO: 132 - protein, 190 aa, Homo sapien
  MISC_FEATURE (181)..(181): X=any amino acid
ELLRYHTSQSGDEMTSLSEYVSRMKETQKSIYYITGESKEQVANSAFVERVRKRGFEVVYMTEPIDEYCVQQLKEFDGKSLVSVTKEGLELPEDEEEKKKMEESKAKFENLCKLMKEILDKKVEKVTISNRLVSSPCCIVTSTYGWTANMERIMKAQALRDNSTMGYMMAKKHLEINPDHXHCGDAAAEG

SEQ ID NO: 133 - protein, 111 aa, Homo sapien
MGVDIRHNKDRKVRRKEPKSQDIYLRLLVKLYRFLARRTNSTFNQVVLKRLFMSRTNRPPLSLSRMIRKMKLPGRENKTAVVVGTITDDVRVQEVPRRDHASITLRRSTCI

SEQ ID NO: 134 - protein, 261 aa, Homo sapien
FPRESGPRPVPRTDSGASVGAGCLRTLAVGPGQEGAGGRDSGCTVIWRSAAGPTGIRGFGGARRPGSELGSCCAAHVLTSASDVWSYGIVMWEVMSYGERPYWDMSNQDVINAVEQDYRLPPPMDCPTALHQLMLDCWVRDRNLRPKFSQIVNTLDKLIRNAASLKVIASAQSGMSQPLLDRTVPDYTTFTTVGDWLDAIKMGRYKESFVSAGFASFDLVAQMTAEDLLRIGVTLAGHQKKILSSIQDMRLQMNQTLPVQV

SEQ ID NO: 135 - protein, 361 aa, Homo sapien
MPGVCDRAPDFLSPSEDQVLRPALGSSVALNCTAWVVSGPHCSLPSVQWLKDGLPLGIGGHYSLHEYSWVKANLSEVLVSSVLGVNVTSTEVYGAFTCSIQNISFSSFTLQRAGPTSHVAAVLASLLVLLALLLAALLYVKCRLNVLLWYQDAYGEVEINDGKLYDAYVSYSDCPEDRKFVNFILKPQLERRRGYKLFLDDRDLLPRAEPSADLLVNLSRCRRLIVVLSDAFLSRAWCSHSFRWVPRGVGWAPAYTHPPDGPAPQGGPVPAAGAHPQTHLHHLRGPEARPRAPGAPPAAPAPPPGDLAALEARLRDSFLRFLERSAAGAAAEGAVQAGGRRPPDAAAGRQGPHADSSRPSP

SEQ ID NO: 136 - protein, 329 aa, Homo sapien
MPGVCDRAPDFLSPSEDQVLRPALGSSVALNCTAWVVSGPHCSLPSVQWLKDGLPLGIGGHYSLHEYSWVKANLSEVLVSSVLGVNVTSTEVYGAFTCSIQNISFSSFTLQRAGPTSHVAAVLASLLVLLALLLAALLYVKCRLNVLLWYQDAYGEVEINDGKLYDAYVSYSDCPEDRKFVNFILKPQLERRRGYKLFLDDRDLLPRAEPSADLLVNLSRCRRLIVVLSDAFLSRAWCSHSFRWVPRGVGWAPAYTHPPDGPAPQGGPVPAAGAHPQTHLHHLRGPEARPRAPGAPPAAPAPPPGDLAALEARLRGAEQAREGPGLAAG

SEQ ID NO: 137 - protein, 164 aa, Homo sapien
PPPLRRRRPPSRRALRRPLGEPEPLPTPHRGAFGRLPEPGLVQPQLPTPSSDFWKEVQLALPRKVRYRPVEGDPQTQLQDDKDPMLILRGRVPEGRALDSEVDPDPEGDLGVRGPVFGEPSAPPHTSGVSLGESRSSEVDVSDLGSRNYSARTDFYCLVSKDDM

SEQ ID NO: 138 - protein, 66 aa, Homo sapien
MLLERRSVMDRGRGEEWRARSESAQSKMLSGVGGFVLGLLFLGAGLFIYFRNQKGHSGLQPTGFLS

SEQ ID NO: 139 - protein, 135 aa, Homo sapien
PHSRKNLLPQLCRMKSFPAWQLFFHKRGLSQDLVATGSATAENVLPCGFLSSCPWPEVPALMAAPHLQLLCSPLPKPYGLPCICTHPVRQTHYIIKCFSKMELNIIWSIWLQRQKMKRKREDYFPNRIMIFMYMS

SEQ ID NO: 140 - protein, 115 aa, Homo sapien
MKSFPAWQLFFHKRGLSQDLVATGSATLQKMSIPCGFLSSCPWPEVPALMAAPHLQLLCSPLPKPYGLPCICTHPVRQTHYIIKCFSKMELNIIWSIWLQRQKMKRKREDYFPIE

SEQ ID NO: 141 - protein, 135 aa, Homo sapien; identical to SEQ ID NO: 139

SEQ ID NO: 142 - protein, 220 aa, Homo sapien
MDQHFRTTPLEKNAPVLLALLGIWYINCFGCETHAMLPYDQYLHRFAAYFQQGDMESNGKYITKSGTRVDHQTGPIVWGEPGTNGQHAFYQLIHQGTKMIPCDFLIPVQTQHPIRKGLHHKILLANFLAQTEALMRGKSTEEARKELQAAGKSPEDLERLLPHKVFEGNRPTNSIVFTKLTPFMLGALVAMYEHKIFVQGIIWDINSFDQWGSGAGKAAG

SEQ ID NO: 143 - protein, 287 aa, Homo sapien
  MISC_FEATURE (7)..(7): X=any amino acid
VRGLGGXAIGLSIALHVGFDNFEQLLSGAHWMDQHFRTTPLEKNAPVLLALLGIWYINCFGCETHAMLPYDQYLHRFAAYFQQGDMESNGKYITKSGTRVDHQTGPIVWGEPGTNGQHAFYQLIHQGTKMIPCDFLIPVQTQHPIRKGLHHKILLANFLAQTEALMRGKSTEEARKELQAAGKSPEDLERLLPHKVFEGNRPTNSIVFTKLTPFMLGALVAMYEHKIFVQGIIWDINSFDQWGVELGKQLAKKIEPELDGSAQVTSHDASTNGLINFIKQQREARVQ

SEQ ID NO: 144 - protein, 147 aa, Homo sapien
MAPGRGLGHAWLVLQNGRACPHRPARLSLWGRVCFPSRGLGIRTLLETFLGVFCRYLKEIAQPTLLCSPSSHHSCLEPWSPCMSTRSSFRASSGTSTALTSGGVELGKQLAKKIEPELDGSAQVTSHDASTNGLINFIKQQREARVQ

SEQ ID NO: 145 - protein, 150 aa, Homo sapien
  MISC_FEATURE (9)..(10): X=any amino acid
SQHFGRPRXXDHLRSDQSGQHGETPSVPKIQKPAGHGGTCLWSQLLGRPRQKTRWNPGGGACREPRLCHCTAAWVTEPDSISTTDALTLGVSVAQGRGAHVTQADGPFATAVDEHVALVRVELGCSDDFGQLLHVSRLDVHDVKASICDF

SEQ ID NO: 146 - protein, 811 aa, Homo sapien
MTDILFLPMWISNQHTPSSPQGDGGSAHTFISTGGPGISTRLHLHRGMGDQHTPSSPQWDGGSAHAFISTGGWGMSTRLHLHRGMADQHTPSSPQGDGGSAHAFISTGGRGISTRLHLHRRTGDQHTPSSPQGDRGSAHTFISTGGWGISTHLHLHRGMGDQHTPSSPQGDGGSAHAFISTGGWGISTRLHLHSGMADQHTPSSPQGDGGSAHTFISTGGWGISTRLHLHSGMADQHTPSSPQGDGGSAHAFISTVGRGISTHLHLHRGTGDQHTPPSPQGHEEAAHTFISTGGRGISTHLHLHRGMGDQHTPPSPQGDKRSAHTFIPTGGQGISIPLHLHRGMGDQHTPSSPQGDGGSAYPFISTGGWGISTHLHPHRGMGDQHTPPSPQGHEESAHTFISTGRRGISTPLHLHRGMGDQHTPSSPQGDGGSAVHTFIKIGEQGISTHLYLHRGTRDQHTPPSPQGMGDQHTPSSPQGDGDQHTPSSPQGDGGSTHPFISTGDGGSAHTFISTGGRGISTRLHVHRGTGDQHTPSSSQGDGGSAHTFISTGGRGSAHTISTGGQGINTPLHLHMGMGDQHTPSSPQGDGDQHTPPSPQGRGGLAHPFISTGRWGISTHLHLHRGTGDQHTPSSPQWDRGSAYPFISTGGWGSAHTFISTEEMGDQHAPSSPQGHGGSAHTFISTGGRGISTHLHPDRGMRNQHTPSSRQGDGMGDQHTPPSPQGHEGAAHTSISTGHRGSAHTSFSTGAQAISTYLHLDRVTGDQHTPPSPQQQEESTHTFISTGGRGISTHLHLHRGTGARLPTPLGDT

SEQ ID NO: 147 - protein, 442 aa, Homo sapien
FRVMTDILFLPMWISNQHTPSSPQGDGGSAHTFISTGGPGISTRLHLHRGMGDQHTPSSPQWDGGSAHAFISTGGWGMSTRLHLHRGMADQHTPSSPQGDGGSAHAFISTGGRGISTRLHLHRRTGDQHTPSSPQGDRGSAHTFISTGGWGISTHLHLHRGMGDQHTPSSPQGDGGSAHAFISTGGWGISTRLHLHSGMADQHTPSSPQGDGGSAHTFISTGGWGISTRLHLHSGMADQHTPSSPQGDGGSAHAFISTVGRGISTHLHLHRGTGDQHTPPSPQGHEEAAHTFISTGGRGISTHLHLHRGMGDQHTPPSPQGDKRSAHTFIPTGGQGISIPLHLHRGMGDQHTPSSPQGDGGSAYPFISTGGWGISTHLHPHRGMGDQHTPPSPQGHEESAHTFISTGRRGISTPLHLHRGMGDQHTPSSPQGDGGSAVHTFI

SEQ ID NO: 148 - protein, 351 aa, Homo sapien
MKASGTLREYKVVGRCLPTPKCHTPPLYRMRIFAPNHVVAKSRFWYFVSQLKKMKKSSGEIVYCGQVFEKSPLRVKNFGIWLRYDSRSGTHNMYREYRDLTTAGAVTQCYRDMGARHRARAHSIQIMKVEEIAASKCRRPAVKQFHDSKIKFPLPHRVLRRQHKPRFTTKRPNNLLSRCRALVRGVPPNKLRNAPKVQAAVPDDFKDFSLLNEEARYYQFKTMVRRAWSAGTHDPEKSTGNRDGERLDAKSSARRWAKRDRTTRRALPAEEEYHSNAKATVRQNKPRRHQSGAKEKKQHNEHAAAQYAARSKETDRKQPVGDNQGETKPPGRKREGEERTAGPNKERNSRH

SEQ ID NO: 149 - protein, 223 aa, Homo sapien
  MISC_FEATURE (4)..(4): X=any amino acid
AFAXGGERGEHAMKASGTLREYKVVGRCLPTPKCHTPPLYRMRIFAPNHVVAKSRFWYFVSQLKKMKKSSGEIVYCGQVFEKSPLRVKNFGIWLRYDSRSGTHNMYREYRDLTTAGAVTQCYRDMGARHRARAHSIQIMKVEEIAASKCRRPAVKQFHDSKIKFPLPHRVLRRQHKPRFTTKRPNNLLSRCRALVRGVPPNKLRNAPKVQAAVPDDFKDFSLL

SEQ ID NO: 150 - protein, 260 aa, Homo sapien
TAVLSPGPRLPSHSARCACEGLAALGTGGAARGVRVGVREGSTQDLRTLLWGRTKHLPGAGGAPGTRRFRQLGALGICGLRPGDGLGGHAHALGLTECDRARGRAKRGGRARRRKEGLVRPAQPDQCRGGNGLGAGPIRAGGFLRRRPSPQLLDCSGAGGTNTWRFFRRGEDFLRAQRIHFLHINLSCWRDTAGKRRPIFVQRTLDLGRNKDDLDPCPHYLEFSMLAKIWTRAVPEGRGPWREAPVTAHPGVGLWALLLC

SEQ ID NO: 151 - protein, 259 aa, Homo sapien
SRVVARPRLPSHSARCACEGLAALGTGGAARGVRVGVREGSTQDLRTLLWGRTKHLPGAGGAPGTRRFRQLGALGICGLRPGDGLGGHAHALGLTECDRARGRAKRGGRARRRKEGLVRPAQPDQCRGGNGLGAGPIRAGGFLRRRPSPQLLDCSGAGGTNTWRFFRRGEDFLRAQRIHFLHINLSCWRDTAGKRRPIFVQRTLDLGRNKDDLDPCPHYLEFSMLAKIWTRAVPEGRGPWREAPVTAHPGVGLWALLLC

SEQ ID NO: 152 - protein, 650 aa, Homo sapien
MQQDGLGVGTRNGSGKGRSVHPSWPWCAPRPLRYFGRDARARRAQTAAMALLAGGLSRGLGSHPAAAGRDAVVFVWLLLSTWCTAPARAIQVTVSNPYHVVILFQPVTLPCTYQMTSTPTQPIVIWKYKSFCRDRIADAFSPASVDNQLNAQLAAGNPGYNPYVECQDSVRTVRVVATKQGNAVTLGDYYQGRRITITGNADLTFDQTAWGDSGVYYCSVVSAQDLQGNNEAYAELIVLGRTSGVAELLPGFQAGPIEDWLFVVVVCLAAFLIFLLLGICWCQCCPHTCCCYVRCPCCPDKCCCPEALYAAGKAATSGVPSIYAPSTYAHLSPAKTPPPPAMIPMGPAYNGYPGGYPGDVDRSSSAGGQGSYVPLLRDTDSSVASEVRSGYRIQASQQDDSMRVLYYMEKELANFDPSRPGPPSGRVERAMSEVTSLHEDDWRSRPSRGPALTPIRDEEWGGHSPRSPRGWDQEPAREQAGGGWRARRPRARSVDALDDLTPPSTAESGSRSPTSNGGRRSRAYMPPRSRSRDDLYDQDDSRDFPRSRDPHYDDFRSRERPPADPRSHHHRTRDPRDNGSRSGDLPYDGRLLEEAVRKKGSEERRRPHKEEEEEAYYPPAPPPYSETDSQASRERRLKKNLALSRESLVV

SEQ ID NO: 153 - protein, 388 aa, Homo sapien [sequence omitted]

SEQ ID NO: 154 - protein, 83 aa, Homo sapien
MKPGEGGQVAPSLPGSGQTCLESQGRTRSSNPPTAPSRLPARPTSHSLGSHGADRPRREHTPPVCALSRSQRPRGHRAMHAPN

SEQ ID NO: 155 - protein, 379 aa, Homo sapien
ASHLLPQAPTASPCVLQETYKLPHRLIEKKRRDRINECIAQLKDLLPEHLKLTTLGHLEKAVVLELTLKHVKALTNLIDQQQQKIIALQSGLQAGELSGRNVETGQEMFCSGFQTCAREVLQYLAKHENTRDLKSSQLVTHLHRVVSELLQGGTSRKPSDPAPKVMDFKEKPSSPAKGSEGPGKNCVPVIQRTFAHSSGEQSGSDTDTDSGYGGESEKGDLRSEQPCFKSDHGRRFTMGERIGAIKQESEEPPTKKNRMQLSDDEGHFTSSDLISSPFLGPHPHQPPFCLPFYLIPPSATAYLPMLEKCWYPTSVPVLYPGLNASAAALSSFMNPDKISAPLLMPQRLPSPLPAHPSVDSSVLLQALKPIPPLNLETKD

SEQ ID NO: 156 - protein, 379 aa, Homo sapien; identical to SEQ ID NO: 155

SEQ ID NO: 157 - protein, 358 aa, Homo sapien
MKPGEGGQVAPSLPGSGQTCLESQGRTRSSNPPTAPSRLPALPHFSFTWLARRRQTAQGAHTASLCAESEPEAAGTPGHARPQLKLHLKAEDSSSPGDFKELRLRGTSAERPPKPSPGQSSSRRSASADRSAQWPRLAAPWSGSPARNHPPPACPKHRDWSTETYQGKLALLGPSSLNCSPMLCATLNLEQLRAHREVLARQNACSRAQAVTTLPGLSSCRMYPAHMYQVYKSRRGIKRSEDSKVSKCTPRDPALSPSRALSFQEKFSRFEVGEGMQGVGSVPLLSDLEKKGQTMVLGATLLLCSSAGLLLRGWEDRLLISFPKRPPPPRASCRRPTNCRTGSSRKRDVTGLTSASPS

SEQ ID NO: 158 - protein, 329 aa, Homo sapien
LQPTHRSLPPPRPPHFSFTWLARRRQTAQGAHTASLCAESEPEAAGTPGHARPQLKLHLKAEDSSSPGDFKELRLRGTSAERPPKPSPGQSSSRRSASADRSAQWPRLAAPWSGSPARNHPPPACPKHRDWSTETYQGKLALLGPSSLNCSPMLCATLNLEQLRAHREVLARQNACSRAQAVTTLPGLSSCRMYPAHMYQVYKSRRGIKRSEDSKVSKCTPRDPALSPSRALSFQEKFSRFEVGEGMQGVGSVPLLSDLEKKGQTMVLGATLLLCSSAGLLLRGWEDRLLISFPKRPPPPRASCRRPTNCRTGSSRKRDVTGLTSASPS

SEQ ID NO: 159 - protein, 425 aa, Homo sapien
CRQERAVAPARRAMERIPSAQPPPACLPKAPGLEHGDLPGMYPAHMYQVYKSRRGIKRSEDSKETYKLPHRLIEKKRRDRINECIAQLKDLLPEHLKLTTLGHLEKAVVLELTLKHVKALTNLIDQQQQKIIALQSGLQAGELSGRNVETGQEMFCSGFQTCAREVLQYLAKHENTRDLKSSQLVTHLHRVVSELLQGGTSRKPSDPAPKVMDFKEKPSSPAKGSEGPGKNCVPVIQRTFAHSSGEQSGSDTDTDSGYGGESEKGDLRSEQPCFKSDHGRRFTMGERIGAIKQESEEPPTKKNRMQLSDDEGHFTSSDLISSPFLGPHPHQPPFCLPFYLIPPSATAYLPMLEKCWYPTSVPVLYPGLNASAAALSSFMNPDKISAPLLMPQRLPSPLPAHPSVDSSVLLQALKPIPPLNLETKD

SEQ ID NO: 160 - protein, 425 aa, Homo sapien; identical to SEQ ID NO: 159

SEQ ID NO: 161 - protein, 64 aa, Homo sapien
HVLELLPGQLEQDDSGPGVTSGQCAGVKDLTGLRRDLRFRPGSGAVKLPVELALAFRNSSSFCR

SEQ ID NO: 162 - protein, 111 aa, Homo sapien
NFKQAVSTGLNSPHPHQPPFCLPFYLIPPSATAYLPMLEKCWYPTSVPVLYPGLNASAAALSSFMNPDKISAPLLMPQRLPSPLPAHPSVDSSVLLQALKPIPPLNLETKD

SEQ ID NO: 163 - protein, 145 aa, Homo sapien
MGKSRCPEGFPIAEVFTLKPLEFGKPNTLVCFVSNLFPPMLTVNWQHHSVPVEGFGPTFVSAVDGLSFQAFSYLNFTPEPSDIFSCIVTHEIDRYTAIAYWVPRNALPSDLLENVLCGVAFGLGVLGIIVGIVLIIYFRKPCSGD

SEQ ID NO: 164 - protein, 270 aa, Homo sapien
LLPTVWQEGMGHEQNQGAALLQMLPLLWLLPHSWAVPEAPTPMWPDDLQNHTFLHTVYCQDGSPSVGLSEAYDEDQLFFFDFSQNTRVPRLPEFADWAQEQGDAPAILFDKEFCEWMIQQIGPKLDGKIPVSRGFPIAEVFTLKPLEFGKPNTLVCFVSNLFPPMLTVNWQHHSVPVEGFGPTFVSAVDGLSFQAFSYLNFTPEPSDIFSCIVTHEIDRYTAIAYWVPRNALPSDLLENVLCGVAFGLGVLGIIVGIVLIIYFRKPCSGD

SEQ ID NO: 165 - protein, 180 aa, Homo sapien
HSGLFLCLFVAELEPAILFDKEFCEWMIQQIGPKLDGKIPVSRGFPIAEVFTLKPLEFGKPNTLVCFVSNLFPPMLTVNWQHHSVPVEGFGPTFVSAVDGLSFQAFSYLNFTPEPSDIFSCIVTHEIDRYTAIAYWVPRNALPSDLLENVLCGVAFGLGVLGIIVGIVLIIYFRKPCSGD

SEQ ID NO: 166 - protein, 796 aa, Homo sapien
MSLDDNLSGTSGMEVDDRVSALEQRLQLQEDELAVLKAALADALRRLRACEEQGAALRARGTPKGRAPPRLGTTASVCQLLKGLPTRTPLNGSGPPRRVGGYATSPSSPKKEATSGRSSVRRYLSPERLASVRREDPRSRTTSSSSNCSAKKEGKTKEVIFSVEDGSVKMFLRGRPVPMMIPDELAPTYSLDTRSELPSCRLKLEWVYGYRGRDCRANLYLLPTGEIVYFVASVAVLYSVEEQRQRHYLGHNDDIKCLAIHPDMVTIATGQVAGTTKEGKPLPPHVRIWDSVSLSTLHVLGLGVFDRAVCCVGFSKSNGGNLLCAVDESNDHMLSVWDWAKETKVVDVKCSNEAVLVATFHPTDPTVLITCGKSHIYFWTLEGGSLSKRQGLFEKHEKPKYVLCVTFLEGGDVVTGDSGGNLYVWGKGGNRITQAVLGAHDGGVFGLCALRDGTLVSGGGRDRRVVLWGSDYSKLQEVEVPEDFGPVRTVAEGHGDTLYVGTTRNSILQGSVHTGFSLLVQGHVEELWGLATHPSRAQFVTCGQDKLVHLWSSDSHQPLWSRIIEDPARSAGFHPSGSVLAVGTVTGRWLLLDTETHDLVAIHTDGNEQISVVSFSPDGAYLAVGSHDNLVYVYTVDQGGRKVSRLGKCSGHSSFITHLDWAQDSSCFVTNSGDYEILYWDPATCKQITSADAVRNMEWATATCVLGFGVFGIWSEGADGTDINAVARSHDGKLLASADDFGKVHLFSYPCCQPRALSHKYGGHSSHVTNVAFLWDDSMALTTGGKDTSVLQWRVV

SEQ ID NO: 167 - protein, 627 aa, Homo sapien
MFLRGRPVPMMIPDELAPTYSLDTRSELPSCRLKLEWVYGYRGRDCRANLYLLPTGEIVYFVASVAVLYSVEEQRQRHYLGHNDDIKCLAIHPDMVTIATGQVAGTTKEGKPLPPHVRIWDSVSLSTLHVLGLGVFDRAVCCVGFSKSNGGNLLCAVDESNDHMLSVWDWAKETKVVDVKCSNEAVLVATFHPTDPTVLITCGKSHIYFWTLEGGSLSKRQGLFEKHEKPKYVLCVTFLEGGDVVTGDSGGNLYVWGKGGNRITQAVLGAHDGGVFGLCALRDGTLVSGGGRDRRVVLWGSDYSKLQEVEVPEDFGPVRTVAEGHGDTLYVGTTRNSILQGSVHTGFSLLVQGHVEELWGLATHPSRAQFVTCGQDKLVHLWSSDSHQPLWSRIIEDPARSAGFHPSGSVLAVGTVTGRWLLLDTETHDLVAIHTDGNEQISVVSFSPDGAYLAVGSHDNLVYVYTVDQGGRKVSRLGKCSGHSSFITHLDWAQDSSCFVTNSGDYEILYWDPATCKQITSADAVRNMEWATATCVLGFGVFGIWSEGADGTDINAVARSHDGKLLASADDFGKVHLFSYPCCQPRALSHKYGGHSSHVTNVAFLWDDSMALTTGGKDTSVLQWRVV

SEQ ID NO: 168 - protein, 627 aa, Homo sapien; identical to SEQ ID NO: 167

SEQ ID NO: 169 - protein, 483 aa, Homo sapien
MLERRALLWQREAGPGWGDRARAGTGGAGGGCGGAMAERGPAFCGLYDTSSLLRYCNDDNLSGTSGMEVDDRVSALEQRLQLQEDELAVLKAALADALRRLRACEEQGAALRARGTPKGRAPPRLGTTASVCQLLKGLPTRTPLNGSGPPRRVGGYATSPSSPKKEATSGRSSVRRYLSPERLASVRREDPRSRTTSSSSNCSAKKEGKTKEVIFSVEDGSVKMFLRGRPVPMMIPDELAPTYSLDTRSELPSCRLKLEWVYGYRGRDCRANLYLLPTGEIVYFVASVAVLYSVEEQRQRHYLGHNDDIKCLAIHPDMVTIATGQVAGTTKEGKPLPPHVRIWDSVSLSTLHVLGLGVFDRAVCCVGFSKSNGGNLLCAVDESNDHMLSVWDWAKETKVVDVKCSNEAVLVATFHPTDPTVLITCGKSHIYFWTLEGGSLSKRQGLFEKHEKPKYVLCVTFLEGGDVVTGDSGGNLYVWGKGP

SEQ ID NO: 170 - protein, 605 aa, Homo sapien
MSSFGAGKTKEVIFSVEDGSVKMFLRGRPVPMMIPDELAPTYSLDTRSELPSCRLKLEWVYGYRGRDCRANLYLLPTGEIVYFVASVAVLYSVEEQRQRHYLGHNDDIKCLAIHPDMVTIATGQVAGTTKEGKPLPPHVRIWDSVSLSTLHVLGLGVFDRAVCCVGFSKSNGGNLLCAVDESNDHMLSVWDWAKETKVVDVKCSNEAVLVATFHPTDPTVLITCGKSHIYFWTLEGGSLSKRQGLFEKHEKPKYVLCVTFLEGGDVVTGDSGGNLYVWGKGGNRITQAVLGAHDGGVFGLCALRDGTLVSGGGRDRRVVLWGSDYSKLQEVEVPEDFGPVRTVAEGHGDTLYVGTTRNSILQGSVHTGFSLLVQDPARSAGFHPSGSVLAVGTVTGRWLLLDTETHDLVAIHTDGNEQISVVSFSPDGAYLAVGSHDNLVYVYTVDQGGRKVSRLGKCSGHSSFITHLDWAQDSSCFVTNSGDYEILYWDPATCKQITSADAVRNMEWATATCVLGFGVFGIWSEGADGTDINAVARSHDGKLLASADDFGKVHLFSYPCCQPRALSHKYGGHSSHVTNVAFLWDDSMALTTGGKDTSVLQWRVV

SEQ ID NO: 171 - protein, 495 aa, Homo sapien
MSSFGAGKTKEVIFSVEDGSVKMFLRGRPVPMMIPDELAPTYSLDTRSELPSCRLKLEWVYGYRGRDCRANLYLLPTGEIVYFVASVAVLYSVEEQRQRHYLGHNDDIKCLAIHPDMVTIATGQVAGTTKEGKPLPPHVRIWDSVSLSTLHVLGLGVFDRAVCCVGFSKSNGGNLLCAVDESNDHMLSVWDWAKETKVVDVKCSNEAVLVATFHPTDPTVLITCGKSHIYFWTLEGGSLSKRQGLFEKHEKPKYVLCVTFLEGGDVVTGDSGGNLYVWGKGGNRITQAVLGAHDGGVFGLCALRDGTLVSGGGRDRRVVLWGSDYSKLQEVEVPEDFGPVRTVAEGHGDTLYVGTTRNSILQGSVHTGFSLLVQGHVEELWGLATHPSRAQFVTCGQDKLVHLWSSDSHQPLWSRIIEDPARSAGFHPSGSVLAVGTVTGRWLLLDTETHDLVAIHTDGNEQISVVSFSPGPFQFYHPPGLGPGQQLLCHQLRGL

SEQ ID NO: 172 - protein, 536 aa, Homo sapien
IGRGRPGQVAGTTKEGKPLPPHVRIWDSVSLSTLHVLGLGVFDRAVCCVGFSKSCSNEAVLVATFHPTDPTVLITCGKSHIYFWTLEGGSLSKRQGLFEKHEKPKYVLCVTFLEGGDVVTGDSGGNLYVWGKGGNRITQAVLGAHDGGVFGLCALRDGTLVSGGGRDRRVVLWGSDYSKLQEVEVPEDFGPVRTVAEGHGDTLYVGTTRNSILQGSVHTGFSLLVQDPATKSLTPSTAEGPQAPAPTVLPPATLIGGGTLQGHVEELWGLATHPSRAQFVTCGQDKLVHLWSSDSHQPLWSRIIEDPARSAGFHPSGSVLAVGTVTGRWLLLDTETHDLVAIHTDGNEQISVVSFSPDGAYLAVGSHDNLVYVYTVDQGGRKVSRLGKCSGHSSFITHLDWAQDSSCFVTNSGDYEILYWDPATCKQITSADAVRNMEWATATCVLGFGVFGIWSEGADGTDINAVARSHDGKLLASADDFGKVHLFSYPCCQPRALSHKYGGHSSHVTNVAFLWDDSMALTTGGKDTSVLQWRVV

SEQ ID NO: 173 - protein, 544 aa, Homo sapien
RLGSGLGVNGRGRPGQVAGTTKEGKPLPPHVRIWDSVSLSTLHVLGLGVFDRAVCCVGFSKSCSNEAVLVATFHPTDPTVLITCGKSHIYFWTLEGGSLSKRQGLFEKHEKPKYVLCVTFLEGGDVVTGDSGGNLYVWGKGGNRITQAVLGAHDGGVFGLCALRDGTLVSGGGRDRRVVLWGSDYSKLQEVEVPEDFGPVRTVAEGHGDTLYVGTTRNSILQGSVHTGFSLLVQDPATKSLTPSTAEGPQAPAPTVLPPATLIGGGTLQGHVEELWGLATHPSRAQFVTCGQDKLVHLWSSDSHQPLWSRIIEDPARSAGFHPSGSVLAVGTVTGRWLLLDTETHDLVAIHTDGNEQISVVSFSPDGAYLAVGSHDNLVYVYTVDQGGRKVSRLGKCSGHSSFITHLDWAQDSSCFVTNSGDYEILYWDPATCKQITSADAVRNMEWATATCVLGFGVFGIWSEGADGTDINAVARSHDGKLLASADDFGKVHLFSYPCCQPRALSHKYGGHSSHVTNVAFLWDDSMALTTGGKDTSVLQWRVV

SEQ ID NO: 174 - protein, 482 aa, Homo sapien
  MISC_FEATURE (2)..(2): X=any amino acid
  MISC_FEATURE (6)..(6): X=any amino acid
SXGHCXDFIWPGHWLSTWHWSRQRPSWGKLMFTGGRNPPYLQAASQPQEATRLAESHVESASNMEQLTRETEDYSKQALSLVRKALHEGVGSGSGSPDGAVVQGLVEKLEKTKSLAQQLTREATQAEIEADRSYQHSLRLLDSVSRLQGVSDQSFQVEEAKRIKQKADSLSSLVTRHMDEFKRTQKNLGNWKEEAQQLLQNGKSGREKSDQLLSRANLAKSRAQEALSMGNATFYEVESILKNLREFDLQVDNRKAEAEEAMKRLSYISQKVSDASDKTQQAERALGSAAADAQRAKNGAGEALEISSEIEQEIGSLNLEANVTADGALAMEKGLASLKSEMREVEGELERKELEFDTNMDAVQMVITEAQKVDTRAKNAGVTIQDTLNTLDGLLHLMDQPLSVDEEGLVLLEQKLSRAKTQINSQLRPMMSELEERARQQRGHLHLLETSIDGILADVKNLENIRDNLPPGCYNTQALEQQ

SEQ ID NO: 175 - protein, 454 aa, Homo sapien
MLMFTGGRNPPYLQAASQPQEATRLAESHVESASNMEQLTRETEDYSKQALSLVRKALHEGVGSGSGSPDGAVVQGLVEKLEKTKSLAQQLTREATQAEIEADRSYQHSLRLLDSVSRLQGVSDQSFQVEEAKRIKQKADSLSSLVTRHMDEFKRTQKNLGNWKEEAQQLLQNGKSGREKSDQLLSRANLAKSRAQEALSMGNATFYEVESILKNLREFDLQVDNRKAEAEEAMKRLSYISQKVSDASDKTQQAERALGSAAADAQRAKNGAGEALEISSEIEQEIGSLNLEANVTADGALAMEKGLASLKSEMREVEGELERKELEFDTNMDAVQMVITEAQKVDTRAKNAGVTIQDTLNTLDGLLHLMDQPLSVDEEGLVLLEQKLSRAKTQINSQLRPMMSELEERARQQRGHLHLLETSIDGILADVKNLENIRDNLPPGCYNTQALEQQ

SEQ ID NO: 176 - protein, 340 aa, Homo sapien
MHDVKNHRTFLKRTKYDNLHLEDLFIGNKVNVFSRQLVLIDYGDQYTARQLGSRKEKTLALIKPDAISKAGEIIEIINKAGFTITKLKMMMLSRKEALDFHVDHQSRPFFNELIQFITTGPIIAMEILRDDAICEWKRLLGPANSGVARTDASESIRALFGTDGIRNAAHGPDSFASAAREMELFFPSSGGCGPANTAKFTNCTCCIVKPHAVSEGLLGKILMAIRDAGFEISAMQMFNMDRVNVEEFYEVYKGVVTEYHDMVTEMYSGPCVAMEIQQNNATKTFREFCGPADPEIARHLRPGTLRAIFGKTKIQNAVHCTDLPEDGLLEVQYFFKILDN

SEQ ID NO: 177 - protein, 304 aa, Homo sapien
  MISC_FEATURE (264)..(264): X=any amino acid
TGPVAMGRVIRGQRKGAGSVFRAHVKHRKGAARLRAVDFAERHGYIKGIVKDIIHDPGRGAPLAKVVFRDPYRFKKRTELFIAAEGIHTGQFVYCGKKAQLNIGNVLPVGTMPEGTIVCCLEEKPGDRGKLARASGNYATVISHNPETKKTRVKLPSGSKKVISSANRAVVGVVAGGGRIDKPILKAGRAYHKYKAKRNCWPRVRGVAMNPVEHPFGGGNHQHIGKPSTIRRDAPAGRKVGLIAARRTGRLRGTKTVQENMWAXSGFAEKNTTTQTQRQTYRKKGGYRGRHSRGNIIAAEDRGG

SEQ ID NO: 178 - protein, 185 aa, Homo sapien
MPEGTIVCCLEEKPGDRGKLARASGNYATVISHNPETKKTRVKLPSGSKKVISSANRAVVGVVAGGGRIDKPILKAGRAYHKYKAKRNCWPRVRGVAMNPVEHPFGGGNHQHIGKPSTIRRDAPAGRKVGLIAARRTGRLRGTKTVQENMWAHKWVCREKTQQRKHKGKHIEKKGATGADTLEVI

SEQ ID NO: 179 - protein, 484 aa, Homo sapien
HGKRGRHGKRGRHGMVSADAMVSADAMVSADAMVSADAMVSADAMVSADAMVSADAMVSADAMVSADAMHTDPDYSAAYVVIETDAEDGIKGCGITFTLGKGTEVVVCAVNALAHHVLNKDLKDIVGDFRGFYRQLTSDGQLRWIGPEKGVVHLATAAVLNAVWDLWAKQEGKPVWKLLVDMDPRMLVSCIDFRYITDVLTEEDALEILQKGQIGKKEREKQMLAQGYPAYTTSCAWLGYSDDTLKQLCAQALKDGWTRFKVKVGADLQDDMRRCQIIRDMIGPEKTLMMDANQRWDVPEAVEWMSKLAKFKPLWIEEPTSPDDILGHATISKALVPLGIGIATGEQCHNRVIFKQLLQAKALQFLQIDSCRLGSVNENLSVLLMAKKFEIPVCPHAGGVGLCELVQHLIIFDYISVSASLENRVCEYVDHLHEHFKYPVMIQRASYMPPKDPGYSTEMKEESVKKHQYPDGEVWKKLLPAQEN

SEQ ID NO: 180 - protein, 483 aa, Homo sapien
MVSADAMVSADAMVWSADAMVSADAMVSADAMVSADAMVSADAMVSADAMVSADAMVSADAMVSADAMHTDPDYSAAYVVIETDAEDGIKGCGITFTLGKGTEVVVCAVNALAHHVLNKDLKDIVGDFRGFYRQLTSDGQLRWIGPEKGVVHLATAAVLNAVWDLWAKQEGKPVWKLLVDMDPRMLVSCIDFRYITDVLTEEDALEILQKGQIGKKEREKQMLAQGYPAYTTSCAWLGYSDDTLKQLCAQALKDGWTRFKVKVGADLQDDMRRCQIIRDMIGPEKTLMMDANQRWDVPEAVEWMSKLAKFKPLWIEEPTSPDDILGHATISKALVPLGIGIATGEQCHNRVIFKQLLQAKALQFLQIDSCRLGSVNENLSVLLMAKKFEIPVCPHAGGVGLCELVQHLIIFDYISVSASLENRVCEYVDHLHEHFKYPVMIQRASYMPPKDPGYSTEMKEESVKKHQYPDGEVWKKLLPAQEN

SEQ ID NO: 181 - protein, 484 aa, Homo sapien; identical to SEQ ID NO: 179

SEQ ID NO: 182 - protein, 484 aa, Homo sapien; identical to SEQ ID NO: 179

SEQ ID NO: 183 - protein, 249 aa, Homo sapien
RMAGPGECDDGPDFPSWRQERLRQFKVKVGADLQDDMRRCQIIRDMIGPEKTLMMDANQRWDVPEAVEWMSKLAKFKPLWIEEPTSPDDILGHATISKALVPLGIGIATGEQCHNRVIFKQLLQAKALQFLQIDSCRLGSVNENLSVLLMAKKFEIPVCPHAGGVGLCELVQHLIIFDYISVSASLENRVCEYVDHLHEHFKYPVMIQRASYMPPKDPGYSTEMKEESVKKHQYPDGEVWKKLLPAQEN

SEQ ID NO: 184 - protein, 221 aa, Homo sapien
MVSADAMVSADAMVWSADAMVSADAMVSADAMVSADAMVSADAMVSADAMVSADAMVSADAMVSADAMHTDPDYSAAYVVIETDAEDGIKGCGITFTLGKGTEVVVCAVNALAHHVLNKDLKDIVGDFRGFYRQLTSDGQLRWIGPEKGVVHLATAAVLNAVWDLWAKQEGKPVWKLLVDMDPRMLVSCIDFRYITDVLTEEDALEILQKGQIGKKERGGL

SEQ ID NO: 185 - protein, 416 aa, Homo sapien
HGKRGRHGKRGRHGMVSADAMVSADAMVSADAMVSADAMVSADAMVSADAMVSADAMVSADAMVSADAMHTDPDYSAAYVVIETDAEDGIKGCGITFTLGKGTEVVVCAVNALAHHVLNKDLKDIVGDFRGFYRQLTSDGQLRWIGPEKGVVHLATAAVLNAVWDLWAKQEGKPVWKLLVDMDPRMLVSCIDFRYITDVLTEEDALEILQKGQIGKKEREKQMLAQGYPAYTTSCAWLGYSDDTLKQLCAQALKDGWTRFKVKVGADLQDDMRRCQIIRDMIGPEKTLMMDANQRWDVPEAVEWMSKLAKFKPLWIEEPTSPDDILGHATISKALVPLGIGIATGEQVSDAPNRWMTSPWGQYTLTSDRGHSCVLGSITCCTLSWEIFIILETGSFYQSLESDIEKVCGYFSNLYD

SEQ ID NO: 186 - protein, 415 aa, Homo sapien
MVSADAMVSADAMVWSADAMVSADAMVSADAMVSADAMVSADAMVSADAMVSADAMVSADAMVSADAMHTDPDYSAAYVVIETDAEDGIKGCGITFTLGKGTEVVVCAVNALAHHVLNKDLKDIVGDFRGFYRQLTSDGQLRWIGPEKGVVHLATAAVLNAVWDLWAKQEGKPVWKLLVDMDPRMLVSCIDFRYITDVLTEEDALEILQKGQIGKKEREKQMLAQGYPAYTTSCAWLGYSDDTLKQLCAQALKDGWTRFKVKVGADLQDDMRRCQIIRDMIGPEKTLMMDANQRWDVPEAVEWMSKLAKFKPLWIEEPTSPDDILGHATISKALVPLGIGIATGEQVSDAPNRWMTSPWGQYTLTSDRGHSCVLGSITCCTLSWEIFIILETGSFYQSLESDIEKVCGYFSNLYD

SEQ ID NO: 187 - protein, 484 aa, Homo sapien; identical to SEQ ID NO: 179

SEQ ID NO: 188 - protein, 349 aa, Homo sapien
HGKRGRHGKRGRHGMVSADAMVSADAMVSADAMVSADAMVSADAMVSADAMVSADAMVSADAMVSADAMHTDPDYSAAYVVIETDAEDGIKGCGITFTLGKGTEVVVCAVNALAHHVLNKDLKDIVGDFRGFYRQLTSDGQLRWIGPEKGVVHLATAAVLNAVWDLWAKQEGKPVWKLLVDMDPRMLVSCIDFRYITDVLTEEDALEILQKGQIGKKEREKQMLAQGYPAYTTSCAWLGYSDDTLKQLCAQALKDGWTRFKVKVGADLQDDMRRCQIIRDMIGPEKTLMMDANQRWDVPEAVEWMSKLAKFKPLWIEEPTSPDDILGHATISKALVPLGIGIATGEQGV

SEQ ID NO: 189 - protein, 305 aa, Homo sapien
MVSADAMVSADAMVSADAMVSADAMHTDPDYSAAYVVIETDAEDGIKGCGITFTLGKGTEVVVCAVNALAHHVLNKDLKDIVGDFRGFYRQLTSDGQLRWIGPEKGVVHLATAAVLNAVWDLWAKQEGKPVWKLLVDMDPRMLVSCIDFRYITDVLTEEDALEILQKGQIGKKEREKQMLAQGYPAYTTSCAWLGYSDDTLKQLCAQALKDGWTRFKVKVGADLQDDMRRCQIIRDMIGPEKTLMMDANQRWDVPEAVEWMSKLAKFKPLWIEEPTSPDDILGHATISKALVPLGIGIATGEQGV

SEQ ID NO: 190 - protein, 484 aa, Homo sapien; identical to SEQ ID NO: 179

SEQ ID NO: 191 - protein, 484 aa, Homo sapien; identical to SEQ ID NO: 179

SEQ ID NO: 192 - protein, 484 aa, Homo sapien; identical to SEQ ID NO: 179

SEQ ID NO: 193 - protein, 138 aa, Homo sapien
WIVVAARYRIRLGLYLTLASEVYYTRLGNDFHTNKRVCEEIAIIPSKKLRNKIAGYVTHLMKRIQRGPVRGISIKLQEEERERRDNYVPEVSALDQEIIEVDPDTKEMLKLLDFGSLSNLQVTQPTVGMNFKTPRGPV

SEQ ID NO: 194 - protein, 386 aa, Homo sapien [sequence omitted]

SEQ ID NO: 195 - protein, 492 aa, Homo sapien
MPWAMIWDFTEPVCRGCVNYEGADRVEFVIETARQLKRAHGCFPEGRSPPGAAASAAAKPPPLSAKDILLQQQQQLGHGGPEAAPRAPQALERYPLAAAAERPPRLGSDFGSSRPAASLAQPPTPQPPPVNGILVPNGFSKLEEPPELNRQSPNPRRGHAVPPTLVPLMNGSATPLPTALGLGGRAAASLAAVSGTAAASLGSAQPTDLGAHKRPASVSSSAAVEHEQREAAAKEKQPPPPAHRGPADSLSTAAGAAELSAEGAGKSRGSGEQDWVNRPKTVRDTLLALHQHGHSGPFESKFKKEPALTAVARTARKRKPSPEPEGEVGPPKINGEAQPWLSTSTEGLKIPMTPTSSFVSPPPPTASPHSNRTTPPEAAQNGQSPMAALILVADNAGGSHASKDANQVHPLWQPVPRCAAPSATSGWRTPILCSARPSLRTSSASLAPDKASNSRELVERSIVPVGKNALLWAPMSPGPLCKGKLQPSLLEM

SEQ ID NO: 196 - protein, 358 aa, Homo sapien
MSGVRPPIMNGPLHPRPLVALLDGRDCTVEMPILKDVATVAFCDAQSTQEIHEKVLNEAVGALMYHTITLTREDLEKFKALRIIVRIGSGFDNIDIKSAGDLGIAVCNVPAASVEETADSTLCHILNLYRRATWLHQALREGTRVQSVEQIREVASGAARIRGETLGIIGLGRVGQAVALRAKAFGFNVLFYDPYLSDGVERALGLQRVSTLQDLLFHSDCVTLHCGLNEHNHHLINDFTVKQMRQGAFLVNTARGGLVDEKALAQALKEGRIRGAALDVHESEPFSFSQGPLKDAPNLICTPHAAWYSEQASIEMREEAAREIRRAITGRIPDSLKNFCPVSFAFLVKQKKSVVILP

SEQ ID NO: 197 - protein, 364 aa, Homo sapien
MGPGHGVMASRPDLQPLQHLGTPGSPGLDVQPQEETPPQGQYQPAAPGATDPLAGRGQAACPPIRAPPTRDLEIKSLGLPHPPLSGAPGVSDGPGAVLLSSASLPSRAGPWGLWFPGRAPHRGFQCQPPPLRTQPQHSGCTDHACAVPSFSQGPLKDAPNLICTPHAAWYSEQASIEMREEAAREIRRAITGRIPDSLKNCVNKDHLTAATHWASMDPAVVHPELNGAAYSRGTLRAWWAWPPLASQLLWKVSSPAPCPCPTACPLWPTRPTPLLLAKPSSPRRIETTPVTSCSPGGALQPRRLGRGPGNPRTRVCGGGICVVALALQRLVRAVRRREGAALGLVSLVVVRPVGALPCVLRVPR

SEQ ID NO: 198 - protein, 192 aa, Homo sapien
AQPACRAERGRGVCGSQAGPPTGGSSAQPPPLRTQPQHSGCTDHACAVPSFSQGPLKDAPNLICTPHAAWYSEQASIEMREEAAREIRRAITGRIPDSLKNCVNKDHLTAATHWASMDPAVVHPELNGAAYRYPPGVVGVAPTGIPAAVEGIVPSAMSLSHGLPPVAHPPHAPSPGQTVKPEADRDHASDQL

SEQ ID NO: 199 - protein, 178 aa, Homo sapien
MREEAPFSFSQGPLKDAPNLICTPHAAWYMDPAVVHPELNGAAYSRGTLRAWWAWPPLASQLLWKVSSPAPCPCPTACPLWPTRPTPLLLAKPSSPRRIETTPVTSCSPGGALQPRRLGRGPGNPRTRVCGGGICVVALALQRLVRAVRRREGAALGLVSLVVVRPVGALPCVLRVPR

SEQ ID NO: 200 - protein, 162 aa, Homo sapien
RMHPTSSAPPMLHGTWTPPSCTLSSMGLPIGTLRAWWAWPPLASQLLWKVSSPAPCPCPTACPLWPTRPTPLLLAKPSSPRRIETTPVTSCSPGGALQPRRLGRGPGNPRTRVCGGGICVVALALQRLVRAVRRREGAALGLVSLVVVRPVGALPCVLRVPR

SEQ ID NO: 201 - protein, 272 aa, Homo sapien
ASCGVGRLVGWGISGGGASLGPGHLGGGASWGRGISEGASGGWSILGGGSRWQRGFPQLAGGVILGVALWLRHDPQTTNLLYLELGDKPAPNTFYVGIYILIAVGAVMMFVGFLGCYGAIQESQCLLGTFFTCLVILFACEVAAGIWGFVNKDQIAKDVKQFYDQALQQAVVDDDANNAKAVVKTFHETLDCCGSSTLTALTTSVLKNNLCPSGSNIISNLFKEDCHQKIDDLFSGKLYLIGIAAIVVAVIMIFEMILSMVLCCGIRNSSVY

SEQ ID NO: 202 - protein, 303 aa, Homo sapien
MSGAVTSHLPQAGLFCTACLGRWWESLWPSALPWQWGQLGHLGGARLPQARPWDLSRCLVVACFSPGMWERHQTQDVPLPAPEAPSPDELAGGVILGVALWLRHDPQTTNLLYLELGDKPAPNTFYVGIYILIAVGAVMMFVGFLGCYGAIQESQCLLGTFFTCLVILFACEVAAGIWGFVNKDQIAKDVKQFYDQALQQAVVDDDANNAKAVVKTFHETLDCCGSSTLTALTTSVLKNNLCPSGSNIISNLFKEDCHQKIDDLFSGKLYLIGIAAIVVAVIMIFEMILSMVLCCGIRNSSVY

SEQ ID NO: 203 - protein, 420 aa, Homo sapien
MLPSQGAWGSSGGLAYTPWSSCPRWGAGLQPSAQGLGIQLDPPHTAARFKCRSRNGSAAVQPRLGGRSQQGPPTLFSHHTGEAALVPVPVPGLPSQPRPTVGPTLCLLMPLPPHAKSQRLWERVKAVGGGWQVQAVGGGCGRWRAPPQVSSCEAPVASTQSAHEVPSPHVASLVSVCVMEEVTEAQKTHQARLGCEVPCCSSLAVSNPTSSQLGGPWWVRHPGPSGVLGCGECVGTHLVSLSPQGIYILIAVGAVMMFVGFLGCYGAIQESQCLLGTFFTCLVILFACEVAAGIWGFVNKDQIAKDVKQFYDQALQQAVVDDDANNAKAVVKTFHETLDCCGSSTLTALTTSVLKNNLCPSGSNIISNLFKEDCHQKIDDLFSGKLYLIGIAAIVVAVIMIFEMILSMVLCCGIRNSSVY

SEQ ID NO: 204 - protein, 247 aa, Homo sapien
SPSCVMEEVTEAQKTHQARLGCEVPCCSSLAVSNPTSSQLGGPWWVRHPGPSGVLGCGECVGTHLVSLSPQGIYILIAVGAVMMFVGFLGCYGAIQESQCLLGTFFTCLVILFACEVAAGIWGFVNKDQIAKDVKQFYDQALQQAVVDDDANNAKAVVKTFHETLDCCGSSTLTALTTSVLKNNLCPSGSNIISNLFKEDCHQKIDDLFSGKLYLIGIAAIVVAVIMIFEMILSMVLCCGIRNSSVY

SEQ ID NO: 205 - protein, 236 aa, Homo sapien
MGVEGCTKCIKYLLFVFNFVFWLAGGVILGVALWLRHDPQTTNLLYLELGDKPAPNTFYVGIYILIAVGAVMMFVGFLGCYGAIQESQCLLGTFFTCLVILFACEVAAGIWGFVNKDQIAKDVKQFYDQALQQAVVDDDANNAKAVVKTFHETLDCCGSSTLTALTTSVLKNNLCPSGSNIISNLFKEDCHQKIDDLFSGKLYLIGIAAIVVAVIMIFEMILSMVLCCGIRNSSVY

SEQ ID NO: 206 - protein, 256 aa, Homo sapien
MGVEGCTKCIKYLLFVFNFVFWLAGGVILGVALWLRHDPQTTNLLYLELGDKPAPNTFYVGIYILIAVGAVMMFVGFLGCYGAIQESQCLLGTFFTCLVILFACEVAAGIWGFVNKDQIAKDVKQFYDQALQQAVVDDDANNAKAVVKTFHETLDCCGSSTLTALTTSVLKNNLCPSGSNIISNLFKEDCHQKIDDLFSGKLYLIGIAAIVVAVIMIFEMILSMVLNDNLCIIGKVRISGRQGFYPNQQHKRQYNC

SEQ ID NO: 207 - protein, 210 aa, Homo sapien
MGVEGCTKCIKYLLFVFNFVFWLAGGVILGVALWLRHDPQTTNLLYLELGDKPAPNTFYVGIYILIAVGAVMMFVGFLGCYGAIQESQCLLGTFFTCLVILFACEVAAGIWGFVNKDQIAKDVKQFYDQALQQAVVDDDANNAKAVVKTFHETLDCCGSSTLTALTTSVLKNNLCPSGSNIISNLFKEDCHQKIDDLFSGKLYLAATTLR

SEQ ID NO: 208 - protein, 58 aa, Homo sapien
NHIEPLKIQWLDVLQREPRPFPKLRILRKVEKIDDFKAEDFQIEGYNPHPTIKMEMAV

SEQ ID NO: 209 - protein, 91 aa, Homo sapien
KFSGSMCFSENPDLSQSSGFFEKLRKLMTSKLKTFRLKGTIRIQLLKWKWLFRVLSKELEGYCQSLGVGLDAEVKVLFALKEKGTRSKICP

SEQ ID NO: 210 - protein, 86 aa, Homo sapien
MDDSEVESTASILASVKEQEAQFEKLTRALEEERRHVSAQLERVRVSPQDANPLMANGTSPFRKKCKKKSIFSSRVELFKESKIIS

SEQ ID NO: 211 - protein, 107 aa, Homo sapien
MIIYYMVHNHVDAQCMILQNRLSVSRRVLRGMVMYTSKDRYFYFGKLDGQISSAYPSQEGQVLVGIYGQYQLLGIKSIGFEWNYPLEEPTTEPPVNLTYSANSPVGR

SEQ ID NO: 212 - protein, 90 aa, Homo sapien
YCRIGLRVARVLRGMVMYTSKDRYFYFGKLDGQISSAYPSQEGQVLVGIYGQYQLLGIKSIGFEWNYPLEEPTTEPPVNLTYSANSPVGR

SEQ ID NO: 213 - protein, 193 aa, Homo sapien
MDERPPGQVTGESPGMHRPEAMLLLLTLALLGGPTWAGKMYGPGGGKYFSTTEDYDHEITGLRVSVGLLLVKSVQVKLGDSWDVKLGALGGNTQEVTLQPGEYITKVFVAFQAFLRGMVMYTSKDRYFYFGKLDGQISSAYPSQEGQVLVGIYGQYQLLGIKSIGFEWNYPLEEPTTEPPVNLTYSANSPVGR

SEQ ID NO: 214 - protein, 189 aa, Homo sapien
AAARAGGESPGMHRPEAMLLLLTLALLGGPTWAGKMYGPGGGKYFSTTEDYDHEITGLRVSVGLLLVKSVQVKLGDSWDVKLGALGGNTQEVTLQPGEYITKVFVAFQAFLRGMVMYTSKDRYFYFGKLDGQISSAYPSQEGQVLVGIYGQYQLLGIKSIGFEWNYPLEEPTTEPPVNLTYSANSPVGR

SEQ ID NO: 215 - protein, 202 aa, Homo sapien
MDRPPGRWRVPGTTRRPVTGESPGMHRPEAMLLLLTLALLGGPTWAGKMYGPGGGKYFSTTEDYDHEITGLRVSVGLLLVKSVQVKLGDSWDVKLGALGGNTQEVTLQPGEYITKVFVAFQAFLRGMVMYTSKDRYFYFGKLDGQISSAYPSQEGQVLVGIYGQYQLLGIKSIGFEWNYPLEEPTTEPPVNLTYSANSPVGR

SEQ ID NO: 216 - protein, 208 aa, Homo sapien
CRAAQCDGSAAGQVEGARHNQTPSHGESPGMHRPEAMLLLLTLALLGGPTWAGKMYGPGGGKYFSTTEDYDHEITGLRVSVGLLLVKSVQVKLGDSWDVKLGALGGNTQEVTLQPGEYITKVFVAFQAFLRGMVMYTSKDRYFYFGKLDGQISSAYPSQEGQVLVGIYGQYQLLGIKSIGFEWNYPLEEPTTEPPVNLTYSANSPVGR

SEQ ID NO: 217 - protein, 189 aa, Homo sapien
MHVERRSVMDRGRGEVAMLLLLTLALLGGPTWAGKMYGPGGGKYFSTTEDYDHEITGLRVSVGLLLVKSVQVKLGDSWDVKLGALGGNTQEVTLQPGEYITKVFVAFQAFLRGMVMYTSKDRYFYFGKLDGQISSAYPSQEGQVLVGIYGQYQLLGIKSIGFEWNYPLEEPTTEPPVNLTYSANSPVGR

SEQ ID NO: 218 - protein, 171 aa, Homo sapien
MLERRIVNGSPGQVQSQMYGPGGGKYFSTTEDYDHEITGLRVSVGLLLVKSVQVKLGDSWDVKLGALGGNTQEVTLQPGEYITKVFVAFQAFLRGMVMYTSKDRYFYFGKLDGQISSAYPSQEGQVLVGIYGQYQLLGIKSIGFEWNYPLEEPTTEPPVNLTYSANSPVGR

SEQ ID NO: 219 - protein, 171 aa, Homo sapien
  MISC_FEATURE (6)..(6): X=any amino acid
HARAAXCDGSPGQVQSQMYGPGGGKYFSTTEDYDHEITGLRVSVGLLLVKSVQVKLGDSWDVKLGALGGNTQEVTLQPGEYITKVFVAFQAFLRGMVMYTSKDRYFYFGKLDGQISSAYPSQEGQVLVGIYGQYQLLGIKSIGFEWNYPLEEPTTEPPVNLTYSANSPVGR

SEQ ID NO: 220 - protein, 156 aa, Homo sapien
MVLDSLHPGKEDGGAEDPGCAGPSQIWTSKALPLSSVQVKLGDSWDVKLGALGGNTQEVTLQPGEYITKVFVAFQAFLRGMVMYTSKDRYFYFGKLDGQISSAYPSQEGQVLVGIYGQYQLLGIKSIGFEWNYPLEEPTTEPPVNLTYSANSPVGR

SEQ ID NO: 221 - protein, 156 aa, Homo sapien
WCWTLCIPGRRMGALRTRDVLGHPRSGRPKLCLSPSVQVKLGDSWDVKLGALGGNTQEVTLQPGEYITKVFVAFQAFLRGMVMYTSKDRYFYFGKLDGQISSAYPSQEGQVLVGIYGQYQLLGIKSIGFEWNYPLEEPTTEPPVNLTYSANSPVGR

SEQ ID NO: 222 - protein, 76 aa, Homo sapien
MVMYTSKDRYFYFGKLDGQISSAYPSQEGQVLVGIYGQYQLLGIKSIGFEWNYPLEEPTTEPPVNLTYSANSPVGR

SEQ ID NO: 223 - protein, 139 aa, Homo sapien
LCRGQKESSTTPSEVLWISVPVPQSLKSQASRPPLPTVPHPRPTQRASAGHSVPGFSECSRGLREATHSSIHSANICQGRVLTRLAWHWGYKEEARFQLSAYTLWWGLVQRQIVAVHFAICMDGDTCRSLCVGTCPEVR

SEQ ID NO: 224 - protein, 568 aa, Homo sapien
MVKLAKAGKNQGDPKKMAPPPKEVEEDSEDEEMSEDEEDDSSGEEVVIPQKKGKKAAATSAKKVVVSPTKKVAVATPAKKAAVTPGKKAAATPAKKTVTPAKAVTTPGKKGATPGKALVATPGKKGAAIPAKGAKNGKNAKKEDSDEEEDDDSEEDEEDDEDEDEDEDEIEPAAMKAAAAAPASEDEDDEDDEDDEDDDDDEEDDSEEEAMETTPAKGKKAAKVVPVKAKNVAEDEDEEEDDEDEDDDDDEDDEDDDDEDDEEEEEEEEEEPVKEAPGKRKKEMAKQKAAPEAKKQKVEGTEPTTAFNLFVGNLNFNKSAPELKTGISDVFAKNDLAVVDVRIGMTRKFGYVDFESAEDLEKALELTGLKVFGNEIKLEKPKGKDSKKERDARTLLAKNLPYKVTQDELKEVFEDAAEIRLVSKDGKSKGIAYIEFKTEADAEKTFEEKQGTEIDGRSISLYYTGEKGQNQDYRGGKNSTWSGESKTLVLSNLSYSATEETLQEVFEKATFIKVPQNQNGKSKGYAFIEFASFEDAKEALNSCNKREIEGRAIRLEARRLPRRQRRRR

SEQ ID NO: 225 - protein, 520 aa, Homo sapien
MVKLAKAGKNQGDPKKMAPPPKEVEEDSEDEEMSEDEEDDSSGEEVVIPQKKGKKAAATSAKKVVVSPTKKVAVATPAKKAAVTPGKKAAATPAKKTVTPAKAVTTPGKKGATPGKALVATPGKKGAAIPAKGAKNGKNAKKEDSDEEEDDDSEEDEEDDEDEDEDEDEIEPAAMKAAAAAPASEDEDDEDDEDDEDDDDDEEDDSEEEAMETTPAKGKKAAKVVPVKAKNVAEDEDEEEDDEDEDDDDDEDDEDDDDEDDEEEEEEEEEEPVKEAPGKRKKEMAKQKAAPEAKKQKVEGTEPTTAFNLFVGNLNFNKSAPELKTGISDVFAKNDLAVVDVRIGMTRKFGYVDFESAEDLEKALELTGLKVFGNEIKLEKPKGKDSKKERDARTLLAKNLPYKVTQDELKEVFEDAAEIRLVSKDGKSKGIAYIEFKTEADAEKTFEEKQGTEIDGRSISLYYTGEKGQNQDYRGGKNSTWSGESKTLVLSNLSYSATEETLQEVFEKATFIKVPRPRPR

SEQ ID NO: 226 - protein, 526 aa, Homo sapien
MLRLPTVFRQMRPVSRVLAPHLTRAYAKDVKFGADARALMLQGVDLLADAVAVTMGPKGRTVIIEQSWGSPKVTKDGVTVAKSIDLKDKYKNIGAKLVQDVANNTNEEAGDGTTTATVLARSIAKEGFEKISKGANPVEIRRGVMLAVDAVIAELKKQSKPVTTPEEIAQVATISANGDKEIGNIISDAMKKVGRKGVITVKDGKTLNDELEIIEGMKFDRGYISPYFINTSKGQKCEFQDAYVLLSEKKISSIQSIVPALEIANAHRKPLVIIAEDVDGEALSTLVLNRLKVGLQVVAVKAPGFGDNRKNQLKDMAIATGGAVFGEEGLTLNLEDVQPHDLGKVGEVIVTKDDAMLLKGKGDKAQIEKRIQEIIEQLDVTTSEYEKEKLNERLAKLSDGVAVLKVGGTSDVEVNEKKDRVTDALNATRAAVEEGIVLGGGCALLRCIPALDSLTPANEDQKIGIEIIKRTLKIPAMTIAKNAGVEGSLIVEKIMQSSSEVGYDAMAGDFVNMVEKGIIDPTKVNG

SEQ ID NO: 227 - protein, 121 aa, Homo sapien
QCDGFAAEVSTVHEILCKLSLEGDHSTPPSAYGSVKAYTNFDAERDALNIETAIKTKEAVDEVTIVNILTNRSNAQRQDIAFAYQRRTKKELASALKSALSGHLETVILGLLKTPAQYDAS

SEQ ID NO: 228 - protein, 71 aa, Homo sapien
NSHQDQRGVDEVTIVNILTNRSNAQRQDIAFAYQRRTKKELASALKSALSGHLETVILGLLKTPAQYDASE

SEQ ID NO: 229 - protein, 242 aa, Homo sapien
MLERRSVMDVVAAEGRSQLSAHGPASFKMSTVHEILCKLSLEGDHSTPPSAYGSVKAYTNFDAERDALNIETAIKTKGVDEVTIVNILTNRSNAQRQDIAFAYQRRTKKELASALKSALSGHLETVILGLLKTPAQYDASELCSRTNQELQEINRVYKEMYKTDLEKDIISDTSGDFRKLMVALAKGRRAEDGSVIDYELIDQDARDLYDAGVKRVKRKGTDVPKWISIMTERSVAPPPESI

SEQ ID NO: 230 - protein, 342 aa, Homo sapien
WIVVAAEGRSQLSAHGPASFKMSTVHEILCKLSLEGDHSTPPSAYGSVKAYTNFDAERDALNIETAIKTKGVDEVTIVNILTNRSNAQRQDIAFAYQRRTKKELASALKSALSGHLETVILGLLKTPAQYDASELCSRTNQELQEINRVYKEMYKTDLEKDIISDTSGDFRKLMVALAKGRRAEDGSVIDYELIDQDARDLYDAGVKRKGTDVPKWISIMTERSVPHLQKVFDRYKSYSPYDMLESIRKEVKGDLENAFLNLVQCIQNKPLYFADRLYDSMKGKGTRDKVLIRIMVSRSEVDMLKIRSEFKRKYGKSLYYYIQQDTKGDYQKALLYLCGGDD

SEQ ID NO: 231 - protein, 72 aa, Homo sapien
PRPLLARRYLCRVTSCFLSLSRAVWWQQAQPQAQAQPRNAERRRRVRGPVRAAEMRPLAIASSVPRTTHPSR

SEQ ID NO: 232 - protein, 103 aa, Homo sapien
LLPFSLARGVVAAGAAGAPSLEMQNDAGEFVDLYVPRKCSASNRIIGAKDHASIQMNVAEVDKVTGRFNGQFKTYAICGAIRRMGESDDSILRLAKADGIVSK

SEQ ID NO: 233 - protein, 112 aa, Homo sapien
LLPFSLARGVVAAGAAGAPSLEMQNDAGEFVDLYVPRKCSASNRIIGAKDHASIQMNVAEVDKVTGRFNGQFKTYAICGAIRRMVSVSLGFAHHFGTSWTLPCALECVMVPE

SEQ ID NO: 234 - protein, 87 aa, Homo sapien
ARGIARGVVAAGAAGAGPASKCRTTPASSWTCTCRGNASASNRIIGAKDHASIQMNVAEVSWEPGRREGCDICAGKAGCPIVEEPLG

SEQ ID NO: 235 - protein, 86 aa, Homo sapien
ARGIARGVVAAGAAGAPSLEMQNDAGEFVDLYVPRKCSASNRIIGAKDHASIQMNVAEVSWEPGRREGCDICAGKAGCPIVEEPLG

SEQ ID NO: 236 - protein, 77 aa, Homo sapien
MRGRGRGTCRGNASASNRIIGAKDHASIQMNVAEVDKVTGRFNGQFKTYAICGAIRRMGESDDSILRLAKADGIVSK

SEQ ID NO: 237 - protein, 86 aa, Homo sapien
IMPSGASVMDAWSRPRYVPRKCSASNRIIGAKDHASIQMNVAEVDKVTGRFNGQFKTYAICGAIRRMGESDDSILRLAKADGIVSK

SEQ ID NO: 238 - DNA, 21 bp, Artificial sequence
  Synthetic
tacgcagagctcatcgtcctt

SEQ ID NO: 239 - DNA, 22 bp, Artificial sequence
  Synthetic
acaaccacgaagagccagtctt

SEQ ID NO: 240 - DNA, 28 bp, Artificial sequence
  Synthetic
tggctgagctcttacctggttttcaggc

1. An isolated nucleic acid molecule comprising:
(a) a nucleic acid molecule comprising a nucleic acid sequence that encodes an amino acid sequence of SEQ ID NO: 96-237;
(b) a nucleic acid molecule comprising a nucleic acid sequence of SEQ ID NO: 1-95;
(c) a nucleic acid molecule that selectively hybridizes to the nucleic acid molecule of (a) or (b); or
(d) a nucleic acid molecule having at least 95% sequence identity to the nucleic acid molecule of (a) or (b).

2. The nucleic acid molecule according to claim 1, wherein the nucleic acid molecule is a cDNA.

3. The nucleic acid molecule according to claim 1, wherein the nucleic acid molecule is genomic DNA.

4. The nucleic acid molecule according to claim 1, wherein the nucleic acid molecule is an RNA.

5. The nucleic acid molecule according to claim 1, wherein the nucleic acid molecule is a mammalian nucleic acid molecule.

6. The nucleic acid molecule according to claim 5, wherein the nucleic acid molecule is a human nucleic acid molecule.

7. A method for determining the presence of a colon specific nucleic acid (CSNA) in a sample, comprising the steps of:
(a) contacting the sample with the nucleic acid molecule of of claim 1 under conditions in which the nucleic acid molecule will selectively hybridize to a colon specific nucleic acid; and
(b) detecting hybridization of the nucleic acid molecule to a CSNA in the sample, wherein the detection of the hybridization indicates the presence of a CSNA in the sample.

8. A vector comprising the nucleic acid molecule of claim 1.

9. A host cell comprising the vector according to claim 8.

10. A method for producing a polypeptide encoded by the nucleic acid molecule according to claim 1, comprising the steps of:
(a) providing a host cell comprising the nucleic acid molecule operably linked to one or more expression control sequences, and
(b) incubating the host cell under conditions in which the polypeptide is produced.

11. A polypeptide encoded by the nucleic acid molecule according to claim 1.

12. An isolated polypeptide selected from the group consisting of:
(a) a polypeptide comprising an amino acid sequence with at least 95% sequence identity to of SEQ ID NO: 96-237; or
(b) a polypeptide comprising an amino acid sequence encoded by a nucleic acid molecule having at least 95% sequence identity to a nucleic acid molecule comprising a nucleic acid sequence of SEQ ID NO: 1-95.

13. An antibody or fragment thereof that specifically binds to a polypeptde of claim 12.

14. A method for determining the presence of a colon specific protein in a sample, comprising the steps of:
(a) contacting the sample with a suitable reagent under conditions in which the reagent will selectively interact with the colon specific protein comprising a polypeptide of claim 12; and
(b) detecting the interaction of the reagent with a colon specific protein in the sample, wherein the detection of binding indicates the presence of a colon specific protein in the sample.

15. A method for diagnosing or monitoring the presence and metastases of colon cancer in a patient, comprising the steps of:
(a) determining an amount of:
(i) a nucleic acid molecule comprising a nucleic acid sequence that encodes an amino acid sequence of SEQ ID NO: 96-237;
(ii) a nucleic acid molecule comprising a nucleic acid sequence of SEQ ID NO: 1-95;
(iii) a nucleic acid molecule that selectively hybridizes to the nucleic acid molecule of (i) or (ii);
(iv) a nucleic acid molecule having at least 95% sequence identity to the nucleic acid molecule of (i) or (ii);
(v) a polypeptide comprising an amino acid sequence with at least 95% sequence identity to of SEQ ID NO: 96-237; or
(vi) a polypeptide comprising an amino acid sequence encoded by a nucleic acid molecule having at least 95% sequence identity to a nucleic acid molecule comprising a nucleic acid sequence of SEQ ID NO: 1-95 and;
(b) comparing the amount of the determined nucleic acid molecule or the polypeptide in the sample of the patient to the amount of the colon specific marker in a normal control; wherein a difference in the amount of the nucleic acid molecule or the polypeptide in the sample compared to the amount of the nucleic acid molecule or the polypeptide in the normal control is associated with the presence of colon cancer.

16. A kit for detecting a risk of cancer or presence of cancer in a patient, said kit comprising a means for determining the presence of:
(a) a nucleic acid molecule comprising a nucleic acid sequence that encodes an amino acid sequence of SEQ ID NO: 96-237;
(b) a nucleic acid molecule comprising a nucleic acid sequence of SEQ ID NO: 1-95;
(c) a nucleic acid molecule that selectively hybridizes to the nucleic acid molecule of (a) or (b); or
(d) a nucleic acid molecule having at least 95% sequence identity to the nucleic acid molecule of (a) or (b); or
(e) a polypeptide of claim 12.

17. A method of treating a patient with colon cancer, comprising the step of administering a composition consisting of:
(a) a nucleic acid molecule comprising a nucleic acid sequence that encodes an amino acid sequence of SEQ ID NO: 96-237;
(b) a nucleic acid molecule comprising a nucleic acid sequence of SEQ ID NO: 1-95;
(c) a nucleic acid molecule that selectively hybridizes to the nucleic acid molecule of (a) or (b);
(d) a nucleic acid molecule having at least 95% sequence identity to the nucleic acid molecule of (a) or (b); or
(e) a polypeptide of claim 12;
to a patient in need thereof, wherein said administration induces an immune response against the colon cancer cell expressing the nucleic acid molecule or polypeptide.

18. A vaccine comprising the polypeptide or the nucleic acid encoding the polypeptide of claim 12.
